United States Patent Application Publication US 2026/0258423 A1 - sequence listing, part 55

SEQ ID NO: 301568 - DNA, 83257441 bp, Homo sapiens (residues 34,156,913-36,291,719 of 83,257,441)
  source 1..83257441: mol_type = genomic DNA
acaagtcgctgagcagctcggagcctgttaaccagcgcataatgccccatgttaaccatcctgggggatgtcagggcggccacgctgatgcactgcggtcgggcgcagcggcacagccttcagagccgccgccgctcggttccttttcccatgatgttttggactccgaatgccgtttctcgccgccggcctccgtccctcctctcctcctcctccaggcccccttttgtgggcagaattccaaatgccagcggccgctgctagcaccggggagaggaggcagcgcgcggcgcggagaggcgaggaccggtatctggagactggggacggaagcggggagctcagaccgggatccattctctcctcgcctcctgggaaaaaagggacaacccccaggtcacaaagcctgcctgcttcccccgccccagctccctgtccctgctaggctgccttggggggaagggcagggcgggggagaagggctggtgggggctggggactttctccaagttttctttttagccttttttgaaggtagctagtgggggcttcttcgagggttgacatgacaccccgccccccaggtggcaggaagacagtgctaaactcctaggagccaggtgtgaggttggaggcggcattcctttgcatcaatgtcagggatcccaggttagacccagcctgggatctccagaggggagaatgctaaaaatgcagaaggaagggggcgatccaaacccacagtgcctctgatgcagacagcgagggggcattctaggagagcagccaggagcccctcctgagacagaaaagccaagttgcccctggagcctcagagaaggagcaacaagtagtcgcctcccccaccgccacatagctgtcgggagagtctgtatttgaaagagaaaggcaactgggactccaggtgggactggctgcataccattccatttgggcagtgtgtgtgtgtgtgtgtgtgtgtgtgtgtgtgtgtgtgtgtgtgtgtattctgatcctggatttgtcagatggaagtacatttgggcagtgtgtgtgtgtgtgtgtgtgtgtgtgtgtgtgtgtattctgatcctggatttgtcagatggaagtacagccggaactataggtgggagcaaagaattagcctttccgctgcctacctcttttttcctgaaactccactggcagtcagctcctgctagcaggtgagtgtggctcgccctattggcccatgccagagctcaaatggctagaacctactgaatcaatggtgctaaattcccatcagaaggaagggaacagaaagtctgagtggccatcccaagccacactgccaagctggggcagagccacatggagtcaccttgatgagccaagctctcatcttcagggctttccaggcttaaatcatactccttggacaatgttggaaaagaaggcagctgagggcacgtccctctaggtttagctctactctgaaatatgttttcattccatctggacccctgctaaactaggtccactgacaaaaacatccaggtgcactctgaagcaacctgtagcattaaatcagtggtttattgatcctgggagctcagagaacagaagcatcacaagcaagcacaatggcaaagattgataaacttcacatattcgttaaccaagaggtcctggactcctaggataggacacaggtttttaaagcaggaggaccaaaattaacaaaggtctaccatgtgtcaggacctgtgtgagggtgtcatatcatcttacttatccctcttaactatcttgacaggtacatgttcttgttattatccctattgtacaggtgaggaagctggggctcacaaaagtaaagtgctgtgtccaagttacagttagtggtgtcagaggtgggacttgaactcaggcatatttgtctccaaaatgcaagttgttaaagcagatccggaacacttcttcccaaatttaggaaaggagcagtcctttctatgctttgtccctgattacacacacacacacacacacacacacacacacatcagttcctcacttgtattaaacatctctatgcctttttttctaccacaccacatctctgttgtcctttttttttttccccagctccaggccctctcctacaggaagacttcctggattaatctgctaatcttcagctcatccacctgtttaataggtatgttggcctctaactctataccaggcactgtatggttttggggaaacaaaagtaaatgagatacatgtcctgcctttgataactcaaggatcagcgggggaggaggcagagagataggtacacacacaagtccctgctccatggtgtggatagcgagagaagcaacatggctcatgggttcctgggattagcactgcccagctggaaatcatgctgctccatatctgttcatgttccttccacctccagccctctcccaggctgtgttccgccctcctccccagcagcccagatctgttttccccatgaagcctcttcttttcacaggatcatattttctctcagttcgtgtcccagacatgttttctcatgtgtgccgagatgggtctcagagttgctctaattgctcctttcccatttagactctttgactgcttacctctacccttcgccatttgtttgttttgaggattacaaacataacgtgatgctctgtgaccttgggggaagtgactaaacttctctgaacttcagtttccccacctccaaaatgatggagcttagaatgcctgcctcacagaacttttgtgcaaatgaaacgagatatagattataaagtgtctggtacaatttagacacttagcaattgacactttctcttgatgactacgaagagaacattcgtttttgatgttggcactctcttacaggtgattggagaaccatttatagctctagaagacatcatttgcccagagcagtgtttacctgttagtgtcaccatcccttcctgtaggccagtgtcaaacacactcctcacactactctgcttcctgtccatggccttaaggtcttctcaaggtcttctgaagcagctcttgactaaagctttccaagagggtgaggcgatttagggtgggaaggggggactagaagagaatagctctaatggtgcatttcacagccgggcacttggctctgtgcttgacatttggcggacattatcagtaactctgagaggagggtattgccaagcccattttacagatgagaaagctgagtacagagaaaaaagctaacttgcccagggtccctcagctgaaaagtggcagagggcttaaatgtcaaacccaagtgtgtctgagtctgaagggtgtggtccacaaactcaatagaaatgcttcaacgagacctcaatagcacagaccatgatggcaacagtcttgaacaggaactgaattatagaatattctttaagaaatactgctataacattttctatcacatgtagcaattcaacttgatggctaataaaacgtttccacatatcttcttaaaaacactctttaattgataatactcactcgcagttagcagtatggtttacataaaggcatcagatattctatcattcttaaaaatgcttttgtgttattcagttggttaagcattcccctcttcaatcaggtttacaatacctatttgcttggcactagtggtaacagagattggttttagagtgggtcaatttggcccagatttgtaagcattgacctaattgtgtataattatggtctttttggtgaagtgtatgacaagacattaaagaacttttcagacaaactcatttgcaaatcaggcagtttaaccccctattagaccacatgcccatatttctgctgtggcaaatttattcacttatgaatgaagtcaggaattaattaactttctatgaccctgaaattgctactctgagacgcaaggagggggaccctcttctaaccctggggaacctaaggccagtcctgagcctggtttctggggagggttagaagctcagggtgcagcctcctgcctctgcaaagagtaacaggcaggagagttaaggaaactgagatctacaatcagctcagctcgaatgctaatttgctacttaacatgtgctaggtacatgccatggccaccacctgctcattaaaggggaaaaatcattctttgctaataaacagatgacattataatttgaaactcggtgatctcaaaatacaacttttccctctgatttgtcattcccataaagaagggttaaagatcaactattgtaaaaccaaagcatctctttgctgttggttggtttataaataaacgcctcatacaacacgtattcccatttagtcagctggtgaacacttagcaagtaatttgtcatgacaggtataccagggaaggatgtgaagcaaagccagacgtttaatgggtagtttactgagattttgtctatagctggttttcttttttctttccaggcaaaacctacagaactagtccacactgagtggacctctggggctcccagctgccgattgacctgaaccccagagtgaactcgtgttgctttgtggcttcaggaaaccttggaacatctctgtgctgttttttcatttgtgctcaatcattcctgaggcctcctcctcctgctgcaatttgacaagacttgaccaaatcattaactcccagttaatgggataaaatgagtttgaatctgggattctggtcattaaccccatgtcaccatctgctccagcagtttgatggcagggctaggtgaattctaatcacccaacacttgttaaactgctgattcctgcttccccacctctgctgactcagcatctctggggtggggcctgcaaaggctctcttccttgacggggttattgagggcagctctaggaacccacccaggaccagacctgatgaggagttcctcctatgcatcaggtatgctgggtcggtttgcggagtttcataacttgcattttcctctgcctggagagttccttgcagctggcttcttctgtgtcacggccccacagagatcttggctggtctccctatctccaccctccaccatgctcactattccattacaagtttccttttctacccagtactaatcattttctgcaattcatctcatttccttgtgaactatctgttggtcctaccagaatgtaagtctccacctgggggcagagaccctgcctggcttgttagaagccatatccccaggattgaagcatatgagagatgctcagaaatacaagaattcatgaacaaatgaacacgagtgaattcattcagctctgatgctgaggctccctctctgagatgaaagaatggggaaccttcttctaatcctggggaacctggggcctgccctgagcctgattcctgaggcaggtgagaggcacctcctacctctcaaccctgtctattgttacccccagcacccagggaagacctcactggagcctgagtcagtgcagggggccaagaggaatctgtgcacccagagaatcttggctgagttacctgattttaaaactcctgacttaaggtgctattgaccaagtactccttagctccatcgcctacaaaaccacaggtgcaggtgaaagttgagtttaggtatgaactgaatactgtttagctaccctatttaaaaaattgttttcatttgtttgtttgttgagacagggtctcacactgtcactcaggctggagtgcagtgacatggtcatagctcactgtggtcttgaacttctggactcaagctctcctcctgcctcagcctcctgagtagctgagactacaaggtgccaccacatccagctaatttttaaaaccttttttgtagaaatgggggctctccctatgttgcccaggtttgtctcgagctcctggcctcaagggatcctcctgcctcagcctcccaaagcagtggccacaggcatgggcactgcacccggccaaaagaaatattctgtcttcgcttccaacttgaaatggactgcttaccttggcacttcccatgccggcttctctccactttccaatctaacaggataatgatgtcatacagaaataacttacagtaggtatttagtaaatgctggtgtgcaatatggaataaaattcacaagaggaattccaaactgttccttatcctcaaatcattttttaatagccaaaaaattagtctgaaatttgagtcctcgcccttcagtgtaaaatcagtagcttttaattttcccttattttgtttgctttaaagaggcacacctacctatagtcccttagtcatgtaagggctgacccctcccactggtctaaagcggggcttctggaccatgcctgaccacagccatctgatcctgaggagcctttaacccagtacttctgtttaaagaaacaaaagtcctctcctaaataaacaaagcaggcctgactcaaatctctccgatgggtaaaggaaagtacccaggagcaggaggcttggatttctgattttatttcgtgtcatttcccttcctcaaaggtgtgaaactccaccccacgccactcctttcctattcatcctctactggatgttttttcctctaaataatttttattttctatttttgtctgtatgtgttctcctcttttagtctacttctgtccctctttcccctgcgaaggaaaaatagaagaaagaagccatctctgtttgctttctccctgtcactcaatctctggagccaactgcttcacaaataaagagaagtgcacagagagtccctgaagcccaccatcaacagacaggctttcaacaaaactgtatcagcaccgccttggccatagctacactctacagaaaatgggagagaggaacagcgctagagaagtttgtccttgcctggttcccgggtggaacttcctctcccccttgtgttctatgcgtgtggttacagctgcctctgatctttggtgaccagcggttggcagtggtggtatttcagcataccttgatcatcgtgcttattacacagcctcctttaccatcaaccctacctaccttcttctagccatgccccccacctcctcccgtctctatccatctcttcgctcttttaaaaaatacttaagtgtgtacagatcacagtgacttcatttgtgtgcccattcacatttgatgacttccataacccccatacaagtagttgtgtattcgttttaattcactttatttatttcctagctctttcataaaataaaatgaaatataagtaatgaaatgggaataaaaaagagaaaaatagaattgagggggaaaaggagaaatgcatctatgtttgtgatcacgttcatctttctccatgcatcaatatgcatactattatgaattcattgcacgtattttaacatgtaggcactacatggggatgtggtgtctacataccacctctatagtggtaggcactgcaaagggacatacaaaaggtaaaaagcatagtctctactctcataggacttttcatctcatggatgtggcactcataatgtcttttatctgtgtcccacttgatgtgaaactctttagtaggcatgatcctatttgatttccataagcagaagaggggtcactgtttccatgttatgagagaggaaactgaggttcagagagtgaaaggaccctgatgagataatggaactggggctcaaatcctggtttcccgactcaacatttcacattctttctactctgtcattattcattagtcaagtttctccacagacaactcactgagccacaacatatgaagcagcatggtaatgccactagactggtcatgatcagaagatgtggccccagggaagagaaagcaagagagctggagatagcagagaaagcaccaaggaagggcttggccgtgcagctctagcagggaggtccttcctttcagcccccaagtgtccctctgtgtctcatctaaaaagcaaaaaaagaggagaactagagcttatggttgaaggcgtgagaatgaggtgtcttttccctctatctctgtaatatacaagtataaatactatatatacatatgtatatgtgttccttttttctgtgtctgattatgcatgcaatttagcaaggatttattgcctaattttggtctgggcactttgctaacgcaatgggggaggataccaagaaattagggactcagcctcattgtccccagagactcctgggggtgggcaaggcacggtgtctgtgcatactgctgggggagctctggattaggggacatcaggagacatgacattgaaatgtcctactcagttctctgtacagattggatttccgtggaagaaagaaaatcaacatgtattgggagtcaacatctcattcagtcctgtgagtttattctgcctatttttcagacaaggagactaaggcttcaagacggtaagtaaattgcccacagtgtcactgctggtgtgggaatgagcttcagggtcattgagtcatgctgctgcccaggtaccctgtaaggccgtcaagtgttgtgggtaagggttttggtgctgacgttcaggtgattgtgagtttaaagcctgggcccacccacaccagcagtgttatttgaagcatgctattgaacgtgcctaaacttccgtttgctcatcggtaacatgggaacagtaacagtgcctacctcataagactgatgggaggatgtgatcagctaaagtgtgtaaagtaccaataagtatctaataaagttcagtaactatgtcactattaataccactgttataatcactacttttgtctaaaggagacccaggtgacatgaagctattatgccctgtggacttgagatcttgaattagggtttgattgtgagactaccagacaagcagtgggatttaaatattcatggaccagggtccatctaggtctgatgggacaaggaagggaccctcacagttgattaccctgagatgggagaggaaactctgctagaggcatttacaccttactaagcatttctggtgtatcaagctctctgctagcttgtgaggatgtaatgttcattaagacatgttcccataggctctggtccagcttctaccagtttttagctggaccactggtttctcctaagacaaacataggagccagatgacttctgtagtgccttgtagacctagtccagtccttggtggttctgtgaacactcaccttggctctgtcccatagaagtaccaggagtcttcccaggggagagattaagaaactcttgctccttcatcctctgtgatggtttggagcctgaacagcctccagcctaggccaagtgttcttggaggattcgcttctttatcccagtccctcatcagtgcctcctataagagccccacctgctttactgagcaattgactcctacatccatatatctctaccactcctcaaaccaaactgccaaccacctctaaggcagctattgatttcactgaccataatggagtgtgttctccattatgctgtttagtcacagcactaaacatcagaagggattcaaagaggaatcaggctaatgcctttcatccaaggagctgacagatggatgagccagactggcatgcacacagtcagcacaagggaataggctgtgatggagctgggtgtgcaggggactgagagtggaattagcatccagtttccaatcctactgctgtagctggcattaaggcattctattactctctccagacacaatcaactttattcttcaaggtagacacttgctatatgccaataactatgccaagaatgtatacgcattatattagttaatgagagtttctcaactttaacactgttgacactttgggctggataattatttgttgtggggagctgtcctgtgcattgtaggatgtttaacagaacccttggcctctatccaccagacaccagcagcgccaccccccttccccaattgcaacaaccaaaaatgtttgcagacattgtcaaatgtcccctggggacaaaatcatcctcagttgggaaccactaaatgaatcctaatatagaccagtgacataggtacaatgatcatttccactttacagtaaactgaggcataacaaggttaaaccatatgtccaaagtcacatagctaggagctggaagcagggccaatctgtttccacagcccttaagcttactgtcctccctgttttgcctatctctgcatgcatggagctaaggactctgtaatactcaataaacccatgcaaagatgaaccatttctaatggcaaaccctgctgtttatattgcatttactatcttaccttccataaaccacacaacaactcttcagtgtagctcctgctcccattttataaaggagcacactgagacctggattgacagaaagggattgccccaagtcacagagcagagcagctaccagaggctggctttgggcccacgtcttgtaattctacactctccagtactcagagagttgagtaaacaccgattaaactataggaggctggcaggcaacttaataaaaaaataaatgcaaatccagcatgatggatatatttagcagataaattattatgtgatggtataaaaatagatcaagggagagcacatgaaattgcaagcctgactgtgtgagagacagggaaggcgcatggagagcgtcgggtacatttaattaactttgctgggaaaacattcacaggctgccacctgaaaccaaaacattcatgggctccacttaaagtcacaatacatgtagtcctattgggaagagttataatccaatagagcttgaagtcattgattaaaacaatgtcagtgctcaaatgctttgatgtgtaaacccaattctcacccgtatataagataaccaggcatgcatttgtggtctgtgtgacccataagctcactgacattaaaatgtcccactcagctttctgtacagatggatttccacggagagaaggaaatcaacatgtattgagagtcaacatctcattcagtcctgtgagtttattctgcctattttaggcaaagagactaaggcttcaagaggacaagtgaaatgcccatagtgccactgctggtgcaggaatgagcttccggaaagagtcaggttcattgagtcatgccaccacccaggtgccttgtgaggccactgagtgtcgtgggtaagggtttgggtgctgccatccagatgactgagtttaaatcctggacccacccacaccagctatgttacttggagcatgctattgcccttgcctaaacttcagtttgctcatctgtaaaatgggagcaataagtgcccacctcataggaatgatgggagaatgtaatgagctaaagtatgtaaaccattgataaatatctaataaaagcttgcaatgataagatgccgttattaattactataatactaatgtctaaaggagccccaggtggcatggagctataccctgtggacttgtgatctctgttccatgccaaatggaaagcatacagtcatgaatcagggtttgagtgtgagagcagacaaagagtgagatttaaatattcattagtcagggttcatctaggtccctggggacaggagaggattctcatgattaatttcaggggccttttccctgagatggggggggacactctgctatggtcatgtacaccttattaagcactgcttgaaatcctccctaccacaaaagtgctgtgatttcaaggtttccctcttttatgggaaaaccatagcacaagaatctacactgtaaaccctatgcctacttaagcccagaaggagcctgttacctcatagaataatcttattttgccttcaaaagaagcagttatcaagtgctcgctgggcttcagctgttttcacatccattttattttgaaagcaactgccctgcagatcttgtgacccttgactgataggcgaggcacccgagaacatgggaacgaatgcatgtgctcgtggttttcatagaatttggggcattggaaaatggaaggtaggtgcttctgggtctcagaaatttgcacgtcagaacccctcctaaggggcgtcatacgtgtctctgagtcttgtatacagagatatccaagcaggagtggaagaatgctttttaaaaagtaacaaagtcaggcctagtagatagagtctgaatgactcattataacataacattttctcctgtctctcaaaacaggagaattagctcactaactattatataagctctttgaggacagagaacaagtctaattgagcattacatcctcaaagactggcagaaatctcaaaacatcagagatgctcaaaactatggaaagaaaaaaaaatgtcctcaaagaaaacttcagcgcatattcttctttttattcaagtatccactgattcaccttcatgggccaggctcttgggtacaatgtgcatgaggcagttcaagtccccaccatcctgggacttggtctaactagtgcttctgcacaaatgagcttccaacagttgtgtattctctgatattgcaggatgaaccataggcccttaaagaagaaaagaaaaaaaaaagaaaaagagtacttaacaattgcattctttgtgtttcttgccagaatggaccagaaactactagcaattatgttgaagccattagtgcaaagccaatttgcttctagagttacagttgcactccaggaacttgagctacactccagagagatcattagttgctgcagacatgttactgagggcagaggtgtcatttccagtctggaatgtcctcagtcaagtgtgggagcagaaaatgggggtcaaaataattaacctcatgtgattttggcaggacttcttgcaaaatcacccatatacacttaacatttatttcagttgaataatctcaatgtatcagttttatcaaaatatttctttttctcttttattttcccacctggctgacctttttttttttaattttttttattttttttttctggctttcaatacaaacacctttaacttactttctttgattccattctcccttcccattcccagtaatagatgattgtaactaatggaactcacaagtattgctggttgatgcctttgctaggattttcagtaccataatcctctcaccagatcataagtctcaggagaaaacacctaatttctccctttgtaaaactttccttgacttcgtttcaattaaatcactttcaccgaccccaggcctccattaactatatccatcgaaatcatctgtttcaccactctgtgtccgaggctgaggcagacaccccggcagcatcccaactgaccgaggagatgacagagtggggctggcaggggttcagttatcaactctgggttccaatactgtttccaccagtcactactggagatgggtccttcaacagctcatcgggagaatgaggataacaacatttatcagcttgtaagaaataaaatggataagtatgtgaagtttctatcagtgtggattttgatgagccttaattccatcatctccattcaacaaacatgtcctgaaatccacctatatgcaaagtgttgcacacgacataagtttgccagctgggtgcattggcttacctctataatccagcactttaggaggctgaggcaggaggatcgcctgagcccaggagtttgagaccagcctgggcaacatggtgagatcctgtctctacaaaaacttttaaaacttagccaagcgcggtggcatgtacctatggtctcagctcctcaggaggctgaggaaggaggattgcttgagcccaggagtttgaggctgcagtgaattgtgatcacgctgctacactccagcctgggtgatagagcaagaccctgtctcaataaatgaataaataagtaaaatatttaaataaaatatttagaactggtatgagatatttcagtaattggggtataattacagtcacatatttttgttgttattaaatgaatcactcaagccatttcttctaatcaacatgaagtccagaatctctctccttgcttcttgatattattttatcttccctgtatttattctcaccacttatctaagagctccagggctttgtcagtcactcttgctttacagggatgcccaatcttttggcttccccggtccacaacggaataagactttgtcttgggccacacgtaaaatacacgaacactaacgatagttgatgagcaaaaaaaaagaaaaaaagaaaaaacatgtttataatgttttgagaaagtttacaaatttgtgtcgggccacattcaaaactgtcctgagcggcgggctggacaagcttgctttaaaatatcaatcagggccatctcctccaaggccaagtgcaattgcccccaactaccaccagaggtcactgtggaagaatgatctcatacaggtctagagacacttcccaccacagccaaggccatgctggtgctggcctagataaccgcacagtggggagctgcggttatatttcccttagttcacaagtacacatgttcaactgttgttactcaggtctatacactgtgtcaggggaaccaggtgctgagacccttccagacgcgtttatacactgagcttcaactagatctccctgagcaatctacctggccccttctctccagtccatgaaccctggtgagtgccaccactctctgccttgtttattcccctcatcaaatgtttctaggatcatagttaccatcttgttccctttcggccgtgtggatctacaggatccatttgcagattggtctacaccttctcaggtccctacataataaagagagacagctgctatttctcaaaaagtgtctccaacagtatccatccctcttcctgacaacacacacacaaagtccttgttacaacctcaggaaaatgactgcctctcataaaagaaaatgtggttgtccttcacagagaagggccaccgtttttttgttttgttttgttttgttttccccctaaatgattgctgttatatctggccagatgctcagtcttaggtactaaaaacacaaaacaagcaaacaaaacattgccctggagaagcttaaaatccagagaagtcaagaaactcccagaccactccaggcaggaaggaattgccccgtttgattaattctcatcccatcagacatgcctccaaggagaccaagaaatcctaagtaccaaggaccatgagaagaagatggctgaggaggcatacaaacaaaaggaaccttgaacaagcagacctctatcattgccctatgggctctttctacctgctgcacagacaaaaccaattcactgagaccatggtactgcagtagagaaagagtttaatgcagagttagctaagcagaagaatgggagttatacctcaaatcaatctccccaggaacttagaagctaggattttcatggataattagatggacagggggctagggaatggatgctgctgattggttggggatgaactcataaggattcagtcctcatgtgctgagtctgcctctgggtgggggccacaggaccagttgagtcatgagtcccagatatgggtggagtcatttggctgtcagaatgcaaaaatcttgaaaacatttcaaagagcaatctgaggccccacaatggtgacattatctatagaagcaactgaggaagtcacagatctggtgacctttggccacatgactcctgagcagcaagggattatagaaaggcaagctaggagacaatgactagtaatcctttagctacatctacatctttgcagaattcaggcccctcccataatcctactcttgtggcctttcattaggcttacaaaggaaatttcattccctcagcaagcaggggattcattttagggaggaattattatcatccatgcttcttcaaagttaaatataaactaaattgctcctatggttagcttggcctatgcccagcctgtgaggctagaaggaagatggggtcaaccatgctagacttctcccactcttgtaatctttgcaaaggcagtttcaaccccaccccagccaccccatcaggagatatagcccttcatgcagttttagggaggaatgaggtccatgagttagctgtgggtaggccaggagaaaagccaatttcagaatccatctacctttaccatcccttgcacattgtgagtaaatgcagaactaaggaagtgaagtgagtgatatcaaggacaaacatcccctcaccttctagttaattccttttgacaacacaaggcctgaggcacttcagccttaaactgcgttcaatgcctttgctttatttccagggaaatgcagcaaggatgttgccatgatgtgcgtactcaggatgtggggaaatgcaaggaggaggggttcgaaggctttgcataaataaatcaaatgaggttgagcaactgttgaaatatgaggaaattgcttccagcagtttaaagtcttggcttgactcgtaatttaaccttgaatatagttttcaaaaatcattaaatccccaaagccttcatctctagcagtgattagccatgatgcagtaagcagaaagttaatatatttatgagaaggtatgtaatgcacgacaaatctattcattcagcactcgtgtagtgaatactgactgattgcttgctcagttactagcactgtgctaagtgctgagaggtaggatagtgaacaaacacagcctccttccccacaaggagcttacaatctaatagcaggaggggacaaggagtcaaaatttatggaatactgctgcatgccagaaattctgctaggaatttttcacacattaacccctgcaagaaccatgcaattttccctgtattatatattagtcaggtggtgcagctgtctggggtaaatacccagggttcatcatctcacgccaagaagatgatggacacgggcacacacaaggagtgagtttaggagtggagatttaataggcaaaagaaagagaaaagagaacagctctctctcttgtgagagagagggctgcttgaatgggaattctggcccatggttgagtgcaccagattttatagacaggcttgaggaagcagtgtctgatttacatagggcccacagattggttggaccaggtgtgatgtttacatagcacgtggggaacactggccaccccaccctaatcttatgcaaatgggcttttcacttggctggcgccatgttgtctactccttactgtacacatggctggcaaagagaagggaacatggagccaccattttgaacattcctagtcccaggtagccttcactcatgcaagcttccagcttgcttgtctatgtctgccgctcaattttacaagttgctgtttgttagaaaagaaaatgattttggggctacttttccttaaaaaaggaaaaccttaccaaggacttccatatcctcactatctgcctaaataatttcttcttaagtcctatatcattagtaaactcaggcactgagaggttaaataatttacccaatgccacctggttacaactggaagatccagacttcaaaccatggtctgtttaattccaaaatctgtgcacttcttatcactttcttcaaggacagagccaaacaggaacagaggctgcccaactcccttctgtactgagctctgttttcctggtttgccatctgtgtaacaaaatggtgagtgcaaatgttagtcgggcctaagcaagtcatggtcctcttcctaacaaagtgaagagttttattttaatttagagttatattaagaaaactaaagagatgggatgagaaggtaagaactccctcttaaggataataggaaggaaataatgtgttaacaacatcaatagttactatagtgctcgctgtgcaccaaacacatgctaggagtagggcatgaatggcttaaaattctcaaacaactccatggggtagatacggttatcatcctcactttacagaagagaaaagtgagatgtggaaaagataagaacttgctcaaggttacacagctggttagtggaagagctggatttgactccagggtctagagtgttagaatgagaagcagtcattgtattgatggcagtaaagacagatagatagatagatagatagatagatagatagatagatagatagatagatagatgatagacagatgatagataatagatagatgatagatagatagatgatagataatagatagatgatagatagataaatgatagatagatagatagatagatagatagatagataatagatggatcataatctgaagtacacaaggacctaccctccagtcgagctttgagcctgctactctggcaacataaaggcaagttggtccctgtggcagtggtcggccaagattgaccccagcccttctcccagggaagaaggtcttgcatctgtggtcatctctagatagttattgtgtatctgggaactcatggctctgctgcttctttggtgacccagcaccctgatcctacttacctgacctgtagcagagaagaaagcaactcctatgcagggctctcaaaacttgccttctgaatatgcgtcactgaatgggaccttggtagggctgtccccttattggttcttgggacatttcaccaagaggtgggagtgggtggggaagggcaaaacttcagtgctacagggtattctttctcttccaagataaacgcagttaaacctgaatgggttgattgcagacgctctgaagccaaactcttgcttacctcacttcctagcttgtgtcatctcaccccgtaagtcttaaaatactggatcactgcccatagtaaaacagctaacactatttacagagcaataacataattagcatccaaaccttagatactttgcaaatgtaaagggagccattcaacaattaccctggagaaacaggcaaaaacaggactatcctagacatatcagatataaagtcaccctgcttctataggaccatctacatgacagacatgaagtgtcacacaagtatgaacccatttaatcctcatggcagccttttttatgtaggaagaattatcatcatttctacgttactaatgaaggaactgacagtcaaaatcacatagccagaaagcagacattgctgttaacctctgtgttatattttccatccccctcaaactagtcatcccccagcaaaagaaaggtatgccttttcctctggtcctaagcttgccttctgacagaagcttggagaaggcggcaaaggaagaaaagtgtgggcagagaagagggcaaccaagcctatgataggaagaagggccacaggatctttctagtgccaatctttagtcacatcacacatctttatgacttcagatgggcatctggggccttgaggtcacaaaatgaataatgatccttacattcctgcatctgcttttggggctcgccctgttaaaaccacaggtgaggacaacatgggaagatttatagttctcagcctgtgtacctacctgccccacctgatggccctcccatctctcctcaagcaattgttcaatgacacccatgcagcctcccagttgccatggaaatggcaagaatgcctctaataggaagtaagaatggaagaagatgattgtacagattcctcaagcaattcctgagcaaattctccaattacccttcgcatccagagtcaaggatttctctgggttacaggaacagcactgaggctttcaacatcctcaccctggcaagctggttgcctccttttgcccagcagtgccacagcactactatgcacagcaactcggctcccttctttcagctggattccttttgtgagactgtaattctgaaacacccagtgaaactggaacaggaacaagaaaggggattcttctgtgattgccccaaaccatttgttgtctgcagaaaacttacattggtgcatccatgggcagggcatgaagagagagtccacagaggagcttgaccctctcatcttcccagagatctaaagagcaggtgtggtgaggaccatcactgaggtcaatcagaaatacctgcttgctcctgccttcatgagagatggctctatttagccacacagacacatcctttttctacctaggcctatcaacctaataggaaatggaggctctgaagactagttttacaagggggtaaaagaaagtctaggaggaaaatggggaggagagtggagaagttgggcaccaagacagcagaagtgttgaaaatgtttgggactagatgggagacagccaaggtcggggcgctggtggcggcagatgggagaagagggtacagagcaactgggcatctgaaggcctgtccagccctggggtgcccactcctgtgttgtcaagcagctcattcccttcctcagaccttggattttgcctccatggagatctcttccatctccgacatttaatgttctagagatagagtgaaaagacacaggaagttgaagcagtatcagaaagtttcagaaatgcccgcagagcagcagaggcttgggctccaaaaaacacactgcaaggacacttcttcccacgattttctaaggaccagatgtgcctcttcttatactgggtattaatcccaaactcccttatcatacatttaaactgtttgcctaactgtccagctcttaattaggcatgtaactggggaaacagggacaatatacaaatgagcaaacaatccccaaactttatttctgttattgcctacaacttcctcccacaggcattaagtagccaagctgaattttttgccctacagtcatttccttttccacttcattttctaatccaaacgtttgagggtcaagtgtttggggccttatttaaaccaccagctggaaaacagtcctcagcaaaatagaggcatgaataagaggcaaacatacatgtagacagacaaattattgttgtgtgagactcatctttgatttcaatttgggaactgagttgagttcaatgctgtctcttcatctgtttctgttataactgcaggaagcagagggtttctgacttctcaacatggtaaaacaaacaaataaacaaacaaaaaccaaacaagcccctcacccacaggtgactgtcaagcctttgttccctttgctgccactgaagccagactggcgcatctgagtaggtttctgggctctctcctacctctatgaagtaattctaggctcactgagaagtgactcctcccactacagctcaccccctaatgcatcaggcccacaactgaccagaatagacttcctttctcttttctgtctgctccctatggagcagttgagaaggttcatttgcatacatcttcatttattgtccttccaaagcctttgataccgagcacgctaagatgggtatcctcattttacaaagatcaaggcagagagaagagaagggactcgcctaggatcacacaattgacatgtcatcgctgtaagtattttaaatgcaggtatgactcccaaacctatgctctccagcactctgcttccaggttttcaggtcctgattgttggagaagagagggcaaggggtggagttggaggtaggaggaagtaggtcagaaataaaaaatatgctagagaaagatacgttgcttactctattctgcaatttttccttgggtcttctttcccttcttggctgagagcatgcattatttatccctcacacacagaatttttgtagtcgtaataaaggtcagaaggggaggagacagttatctaaatctgcgctatatccaggtgcacttagaatgacatattgagtctaatggaatcttttgagaaacaaaacaagacatgagcctcaatgtttcttttttcagtttttcctttcttcttcttctttgctccctttctccttccaaaaaaaaaaaaaaaaaaaaatttgttggcaagttggtatcccttccagacccattttcattcctccctccctgaactgtcctttgagataacctcagtgctcttttcatacctaaatcagggagcctgggatgagctatgtcactctgatgcattctggtgtaagctttcccttctctgattttggaacccccttggatagcttcaaagttctcttttaaaatcctcaaacctattcactttaattaaaacaataaatatgtgctctgtagcgtttggcaagagtgactttggggatattaaggcataaaagtgaacagatgggatgttgcagttccggaaaagatggacccccccttaggcgggtacttgccagttgggtgatgcgcctccatctacaaccaacagggacattttcgttactggttaccgacctttttgttctcctcggttgactatccctgacctgattttcagtcgtgttcagccacagtaagctgtcaagctggtctgtctgcattagaggcagaagacctgccgcttttacaaaagatccctgagtatagggctatttagttttttttttagtatctgaaggaaatgagcctggctcaggaagaggggttcagaagcgtttcattccgctctcattcctgggactccaccaaaaacaaccaccaaaaagataaaatattgttttaattgctgaagcaaggaaactagcaaatgtctccaaacaataaattattaattatatctgccaaatgctgtcttgatggagatgtgagaaccaggtgggagaccgcatttactgcctccggtatctggaagggtgaggatttccctaggggaagtgtccttgtcccaaagttgatacccagggattctctgagtggagtggcagtgtctggcatcatctacaagctacaagagaggtggacatacattgtagagaacaagttcatgtggaatggagaagagtggctttaggagtaatgatggtaatacatatttttagatatccagataatgaataaatgacaatatagcataaagataaaaaataagattgtacaatattgaaggagaacaaagttggagatgctacctgattttaagacttactatcaagctacaataatcaagactgcatggtactagggaagaaagagacaaatggatccatggaacagaatagagggcccggaaatagacctacaaaaataatagcctgctgatctttgacaacggagcaaaagcaataaaatggaggaaaaaaaagtcttttcaacaaatacagctggaacaactgaacatgcacatgcaagaaaaaaaaaaaaaaacctcacgaatgtagacacagaccttacacctttacccaaaattaactgaaaatggatcacagacctaagtataaaatatgcaaaatgagaaaactcctagatgataataggagaaaatctagatgaccttgagttcagagataattttagatacaacaccaaaggcataatccagaaaaaagaattgttaagttggacttcagtaaaattaaaaagttttgctctgcaagagaccctgtcaagagaacactgtgatgttacctggccacatcctgaagaaaataattgcaagaggcatatctatttgataaagaactcttatccgaaatatacaaagaacacttaaaactcaacaaaaagaaaacaaacctgattcttaaaaaaatgatacaaagaccttaacagaaatcccatcaaagattttcagatggcaaataattacataaaaagacgttccacatcatatgccatgagagaaacacaaattaaaacaatcaaaacaacagtgcaatacactgcacacttattagaatgaccaaaatgcagaacaccaacaaattctggctagaatgtgaagcaacaggaactgtcattcattgttggtattgatgcaaaatggtacagccgctttggaagacagtttggtggctttttacaaaacttaatatactctaactatgagatacagcaatcatgctccttggtatttacccaaaggagttgaaaacttatatctacaaaatcttgctcacttttatttatagggctttattcataattgccaaaacttggaagcaaccaagatgtcctttagtcagtgagtgaataaataaactaccatacacgagacaatggaatactattcagcactaaaaataaatgagccatgaacagacttggagaaaatgtaaatgcacattactaagtgaaagaaaccagtctgaagaggctacatcctgtatgattccaactatacgatattctggaaaaggcaaacctatgaagacagtaagaagatcagtggttttcaaggattagtaggagggagagatgaattggcagattacagaggagtttcagggcagcaaatctattctgcatgatactataatcatagatacatgtcattatacatttgtctaaacacatagaatggacaatgtcaacagtgagccctaacataaactttgggtgataatgatgtgtcaatgtaggttcctcagttgtaaaaaatgtgcctctctggtgggggatgttgataatggggaggctgtgcaggtggggcaggggttatatgagaagtctgtgttccactcaattttgctgtgaaaccaaaactgccctaaaaaaataaagtgtattaataaaaataatttcattagagaaggatgaagaagaagaagagagagaaagggaaggagaaggagatgaaaaagaagtcgggattcagagatggaaagtaaattttagttgaccatttcccttgtgccaggcactgtgctagatactttaaatatacatcttattttgctatattctcaaaatagtgcaagatcaagattcttatctctatgttaggtataattaaattgatagttatagaagttagatcattataacaaggtcaaacaactagtaacagacattttaactcagctgtactgatggcaaagcccaagctccttcaattacatcctcctcctcctcctcatcatcactcacagcatcttcaccttcatcatcaccgacatgcattgagctctcagatgcatcatccctgtgaacacacaatctttttatttaattctcgcaacaactccattttgtagtcaagtacactggtgttcagacaaacttaaataacactttccagatcgcacatctggtaagcagcagagcccagagctatctgattccttacttttaaccatgctgatctactgtttgtcactattttcagatagagcccatggttccccttactggataacaaatcatttttcctctcttggatgtaacctccccatctacaaaatgagcagtttgtactaaatgatttaagattcctttccaatctaatctgacaaactaatctaatttcagagcagccgcgtggagggaatgtttttgctttgggtttgtatttctgaaataacctgtcttctctcttcccaggagaccagcagtaaatacacagatggataagactcaaaagaacctacaaatcctgtacaatgaaatcacgtggcaagaatgtggttattctgagaaacagaataaagcagcattttgctgtgccttttcacacagctgccaatcaatggtacatgctggcatactttcagaatagctgctctgtttaacccaatgacccagaggcagcaatttggagcttagcaagtcacatcccatgacatccaggatgccctctccacctacctgcacccagtcaatcaccaagtcacagggatttcacctctggaataatttcaatcaccacctgcattcccaatggcttcgtccaggctcttatctcttagctgcactatagcagtaacctcctaactgcctctgcacactatagtcctccctcctctgtgctattagagtaatatttttcaaatgcaaatctgatcatgacactctctctttttttttttttttttgagacggagtctcgctctgtcgcccaggctggagtgcagtggtgcgatctcggctcactgcaagctctgcctcccaggttcatgccattctcctgcctcagcctcccaagtagctgggaccacaggcgcccaccaccacgcccggctaattttttgtatttttaggagagacggggtttcaccgtgttggccgggatggtctctgtcaggcctctgagcccaagccaagccatcgcatcccctgtgacttgcacgtatacgcccagatggcctgaagtaactgaagaatcacaaaagaagtgaaaaggccctgccccgccttaactgatgacattccaccattgtgatttgttcctgccccaccttaactgagtgattaaccctgtgaatttcctactcctggctcagaagctcccccactgagcaccttgagacccctgcccctgcccaccaaagaacaaccccctttgactgtaattttccattaccttcccaaatcctataaaacggccccacccctatctccctttgctgactctcttttcggactcagcccgcctgcacccaatgaaataaacagccatgttgctcacacaaagcctgtttggtggtctcttcacacggacgcgtatgaaatttggtgccgtgactcggatcgggggacctcccttgggagatcaatcccctgtcctcctgttctttgctccgtgagaaagatccacctacgacctcaggtcctcagacccaccagcccaaggaacatctcaccaattttaaatcaggtaagcggcctcttcttactttcttctccaacttctctcactgttcctcaaccactttctcctttccactcttcaatctctcccttgtcttaatttcaattcctttcattttctgggagagacaaaggagacatgttttatccgtggacccaaaactccagtgccggtcacggactgggaaggcagccttcccttggtgtttaataactgcagggacacctctctgattatacacccacgtttcaagggtgtcagaccacgcagggatgcctgccttggtccttcacccttagcggcaagtcccgcttttctggggaaggggcaagtacttcaaccccttctctccttgtctctaccccttttctgctttcctggggcaggggcaagtacccctcaaccccttctccttcacccttagcggcaagtcccactttcctggggcaggggcaagtacccctcaaccccttctctttcacccttagtggcaagtcctgcttttctagggggcaagaatccccaatcacttatttctgcaccccaacctcgtatctctgtgccccgaccgcttatttctgtgccccgaccccttatttccatgccccgaccccttatttctgagtcccatcccttatttccatgccccgacctcttatctctgcgccccaaccccttttcccacttttctggaaggtaagaacccccgaaccccttccctccgtttctctactctctcttttctctaggcttgcttccttcactataggcaaccttccaccctccattcctccttctactcccttggcctgtgttctcaaaaacttaaaacctcttcaactcacacctggcctaaaacctaaatgccttattttcttctgcaatgccgcttgaccccaatacaaactcgtcaatagttccaaatagccagaaaatggcactttgaatttttccatcctgcaaaatccaaataattcctgtcgtaaaataggcaaacggtctgaggtgcctgacgtccaggcattcttttacacatcagtcccttcctagtctctgtgcccagtgcaactcgtcccaaatcttccttctttccctcccacctgtcccctcagtaccaaccccaagcatagctgagtctttctaatcttccttttttacagacccatctgacctctcccttcctccccaggctgctcctcgccaggccgagctaggtcccaattcttcctcagcctctgctcctccaccctataatctttttatcacctcccctcctcacacctggtccggcttacagtttcgttctgtgactagccctcccccacctgcccagcaatttactcttaaaaaggtggctggagccaaaggcatagtcaaggttaatgctcctttttctttatcccaaatcagatagcgtttaggctttttcatcaaatataaaaatccagcccagttcattgctcgtttggcagcaacgctgagacgctttacagccctagaccctaaaaggtcaaaaggccatcttattctcaatatacattttattacccaaatctgctcccgacattaaataaaactccaaaaattggaatctggccctcaaaccccacaacaggacttaattaacctcaccttcaaggtgtacaataacagaaaaaagttacaattccttgcctccactgtgagacaaaccccagccacatctccagcacacaagaacttccaaacgcctgaaccgcagcagccaggcattcctccagaacctcctcccccaggagcttgctacatgtgcgggaaatctggccactgggccaaggaatgcccgcagcctgggattcctcctaagccgcgtcccatctgtgtgggaccccactgaaaatcagactgttcaactcacctggcagccactcccagagcccctggaactctggcccaaggctctctgactgactccttcccagatcttcttggcttagcggctgaagactgacactgcccaatcacctcggaagccccctagaccatcacagacgccgagcttcgggtaactctcacagtggaaggtaaacccgtccccttcttaatcaatacggaggctacccactccacattaccttcttttcaagggcctgtttcccttgcctccataactgttgtgggtattgacagccaggcttctaaacctcttaaaactccccaactctagtgccaacttaggcaatactcctttaagcactcctttttagttgtccccacctgcccagttcccttattaggccgagacagtttaactaaattatctgcttccctgacgattcctggactacagccacatctcattgccgtccttctccccaacccaaagcctccttcgcgtcttcctctcatatccccctaccttaacccacaagtatgggacatctctactccttccctggcaactgatcacatgcccattaccatcccattaaaacctaatcacccttaccccactcaacgccaatatccaatccctcagcacgctttaaaaggattaaagcctgttatcactcgcctgctacagcatgggcttctaaaacctataaactctccttaccattcccccattttacctgtcctaaaaccagacaaggcttacaagttagttcagaatctgcgccttatcaaccaaattgttttgcctatccactccatggtgccaaacccatatactctcctatcctcaatacctccctctactacccattattctgttctggatctcaaacatgctttctttactattcctttgcacccttcatcccagcctctctttgccttcacttagactgaccctgacacccattaggctcagcaaattacctgggctgtactgccgcaaggcttcacagacagcccccattacttcagtcaagcccaaatttcatcctcatctgttacctatctcggcataattctcacaaaaacacatgtgctctccctgctgatcgtgtctgattaatctcccaaacctcaatcccttacaaaagaacaactcctttccttcctaggcatggttagtgcggtcagaattcttacacaagagccaggaccacaccgtgtagcctttctgtccaaacaacttgaccttactgttttagcctagccctcatgtctgcgtgcagcagctgccactgctttaatactgttagaggccctaaaaatcaaaaactatgctcaactcactctctacatttctcataacttccaaaatctattttcttcctcatacctgacgcatatactttctgctccctggctccttcagctgtactcactctttaagtcccacaattaccattgttcctggcccagacttcaatctggcctcccacattattcttgataccacacctgatccccatgactgtatctctctgatccacctgatattcaccccatttccccgtatttccttctttcctattcctcaccctgatcacgcttgatttattgatggcagttccaccaggcctaatcgccacacaccagcaaaggcaggctatgctatagtacaagccactagcccgcctctcagaacctctcatttcctttccgtcgtggaaatctatcctcaaggaaataacttctcagtgttccatttgctattctactcctcctcagggattattcacgccccctccctgccctacacatcaagctcgaggatttgcccccacccaggactggcaaattagctttactcaacatgtcccgagtcaggaaactaaactattagacctcttagtctaaatagacactttcactgaataagtaaaggcctttcctacagggtctgagaaggccaccacagtaatttcttcccttctgtcagacataattcctcagtttggccttcccatctctatacagtctgataacagaccagcctttattagtcaaatcagccaagcagtttttcaggctcttagtattcagtgaaacctttatatcccttacggtcctcaagaaaagtagaacggactaaagggtcttttaaaaacacatctcaccaagctcagccaacaacttaaaaaggactggacaatacttttaccactttctcttctcagaattcaggcttgtcctcagaatgctacaaggtgtacaggagcccatttaagctcctgtatagacgctcctttttattaggccccagtctcatttgacaccagaccaacttagactgtgcccccaaaaaaacttgtcatccctactatcttttgtctagtcatactcctattcaccattctcaactactcatacatgccctgctcttgtttatactgctggtttacactgtttctccaagccatcacagatatctcctgctgctatccccaaactgccactctaaactcttgaagtaaataaataatctttgctggcaggactatgctgaatctccttaggcactctctaatcagatgtcctaggtcctcccaattcttagaccttttatacctgtttttctccttctcttattccatttagtttttcaattcatacaaaaccgtatccaggccatcaccaatcattctgtacgacaaatgtttcttctaacaaccccaaaatatcaccccttaccacaagacctcccttcagcttaatctctcccactctaggttcccacgccgcccctaatcccgcttgaagcagccctgagaaacatcgcccattctctctccataccacccccaaaaattttcgccgccccaacacttcaacagtattttgttttatttttcttattaatataagaaggcaggaatgtcaggcctctgagcccaagccaagccaacgcatcccctgtgacttgcacatatacacccagatggcctgaagtaactgaagaatcacaaaagaagtggaaaggccctgccccgccttaactgatgacattccaccattgtgatttgttcctgccccaccttaactgagtgattaaccctgtgaatttcctactcctggctcagaagctcccccactgagcaccttgtgacccctgcccctgcccaccagagaacaaccccctttgactgtaattttccattaccttcccaaatcctataaaacggccccacccctatctcccttcgctgactcagcccacctgcacccaggtgaaataaacagccatgttgctcacacaaagcctgtttggtggtctcttcacacagacgcgcatgaaagtctcgatctcctgacctcatgatctgccctccttggcctcccaaagtgctacaattacaggcgtgagccaccgtgcccggccgacactctcttaaattaatcactttgaatagtaaagttaaaaaaaaaaaatcaccagctcatattaaaaagccatttatgggctgggcacggtggctcatgcctgtaatcctaggactttgggaggccgagatgggcagatcacgaggccaagagatcgagaccatcctggccaacacggtgaagccccgtgtctactaaaaatacacaaattaaccaggtgtggtggcgcgtgcctgtagtctcagctactctggaggctgaggcaggagaatcgcttgaacccaggaggtggaggttgcagtgagccaagatcacaccactgcactccagcctggtgacagcgagattccgtctcaaaaaaaaaaaaaaaaaactcattcataatccgacctttacctcctttacctaaatatgttcagcttcacctgtctctcattccagcctgttatttctcagctttactgaacttatatccatattcctcagagatgaatgaattttcatgctttcatgtcttttttcttctcacccagaatgctccttattttctctccgagtcgtggactctatgcctgctcatgtgtcaagacgtagctcaacttccaacttcactaaaattatcaacctcacggtgggttctcagctagagttaggccttcccatagctctaaatctctagcacttaacagacaatattttagatagttggttttgcattcattgtctttattggagtgaaagctttctaaagaaaaggaaggtacctaaatatttaacagatgtatcaatacctaagactagactatgcaagtggctctcctgggtgaattaataaatactcaaataaatacttgaatgaagagaagagccaaggagcacccacaccagaatattcgagaaaagtatttgataagatcattttgcaagagtttatgaggtatatccaggaaacacatattaaatgctatttgaccacagattccataaaattatgcagagaacaaaagaattatagatcaagaacttctccaacagtttctgatgatctggtgaagaaatcaatgtccacagtcatgaaataataaaaaataattcaatatatgacaattatgaaattaattatgaaattaataaaatcttattaaattatgaaattaataaaatctgaatcaaaaatccaaggggatttttttattaattcttgacagaatgaagttaattgggaagatcaaaaacagacgagcacaatctcaataaaaaatcacagcaggtatttgtgtggtaattgataatcttatactaaaatttatataaaaatccaaagacccaggaatagccaaggcaaccttgcagaagaataaagctacagggcttatattaccagtgagtaagatctattttaaagttttagtaattaagacatttttggtatttgcacaagaatagttaaattgataaatgagatagaatagagactgggcatggaggcccatacctgtaatctcagcactttgagaggtggaggcaggtggatcgcttgagccccaggagtttcagaccagcctgagaaacatgtcaaggttctatatctacaaaacaaaaacaaaaacaaacaaaaaaaacacaacaattagctcaggcgtggtggcatgtgcctgtagtcccagctactccagaggctgaagtgggagaattgcttgagcccaggaggttgaggctgcagtgagctgtgactgcaccactgcactccatcctgggtgacagagtgagactctgtctcaaaaaaaaaaaaaaaaatacagtggttacagtcttccacatacatggctgcctgatttgtgacatacaaaaaaatcatatttgctgcccttttgtatgtgtcttcctccattcaaccttgttagtgagattcatccatatcgtcaaatatagttttaaatcattcatgctcattgctgtgtaatattcattcatacagtgtgcatctcttaggcagtggagaaaagacaggcatcttaatcaatggttctgggtcagttggatacccatatgaaaggatatattttatccttctacctcacatcatacacaaaaatcaattgatagcattaggagatatacctaatgtaaatgacgagttaatgggtgcagcacaccagcatggcacatgtatacatatgtaacaaacctgcacgttgtgcacatgtaccctagaacttaaactataattaaaaaaatcaattgcaagtggattgcacatctaaatctgaagataagaaacattaagcttatataagaaaacatgattatgatattggagacgacaaagatttcttaaacatgttaccaaaaatgcaaccgtaagagaaaaaagtaatgtattagattgtattaaaacgttaatggtgtcatcaaaggacacaaaagagtgaaaaggcaacccaaagagtaaaagatgatatttacaacatacatatctaacaatgaacacaaatcccaactatatgaagatctcctagtagtcagtttttttttaaagcaactcaataaaaagaaggcaaaaaacttgaagatacagttacatagatataaaaatgaccaataaagctacaaaaatgtgtatggcctgatgagtcatcatgaaaatggaaattcaaacctcagtatcactcacactagaatagctaaataaataagacagaaagtactaagtgtgggtaagggtgtaggcaactggacatcttaaatactgctaatgggattgtaaattactacaaccactctggaaagctatctgtgagtatctgctataaagaatatatacatactctgtgacccagtaattctactcccaggaatagattgaacagaagtgcatacatatgctcaccaatgaattgcatgcatatgttcacataaggtactagaacattcatagcagcattatttgtagtagttccaagcttggaaactacccaaatacaaatcaatagtagaatgaaagaatcaatcatggcatatttacacaaagaaatactatacagcaatgggcatgaacaatttaaaactatactcaacaatatggatgactctcaaaaacataaagttgaatggaagaagacaaatacaaaaggagaagccatatggttcttattacataaagtccaacaataggcaaaaccaatcttgatcaaagtcaagacatcgtcacccttggagtgggcatcagctggaagaggttgatggtttgatggtaggatggtgcttctggggtgctggtaatgctgtatttcctgatttggcttaggctgacacagtcagtctgtgaaaatttattgggccattcacttatgaaatgtggactcttcctatgtatattacacttcaataaaacatttaaaacagttttttaaatttttatgtaaggaaacaaatattaaaacatataaacctacaataatgtaaaaagtgttgtgttgccacaagactaggaatatagatccatggaacgcaatggaaaaccaagaaaaatagcttggtagatttaagaactaagtatacgattaagatgaaatttgggatcagcaagaaaaaagggaattcaccaacaacagtgttaggacaaatttagtaatttgttggaaggaaaaaaaaataccttctttaaaccatatactaaaaaatgtccaggccaggggtggtggctcatgcctgtaattccagcactttgggaggctgaggcaggtggatcacttgagatcaggagtttgagaccagcttgggcaacatggcgaaaccccatctctactaaaatacaaaagaaattagcttggcatggcggcgggcgcctgtaatcccagctactccggaggctgaggcaggagaatcgtttgaacccgggaggcgggggttgcagtgagccgagatcgagccattgcactccagcctggcgacagagcgagactccgtctctacaaaacaaaaacaaaaataaccactacaaagataaagtgttttaagtaaaactaaaatgtaaattaaagattggaatgaaggattacttatgacaagagattactgcgctttaatcctaaagagctcttttttttttttttctttttgagacggagtcgcactcttgttgcccaggctggagtacaacggggcaaattcagctcactgcaacccccgcctcccggtttcaagcgattctccttcctcagcctccggagtagctgggatcacaggcatgcaccaccatgcccggctaattttgtatttttagtagagacggggtttcactctgctggtcaggctggtcttgaactcctgacctctggtgatctgcccgcctcggcctcccaaagtgcagggattacaggcgtgaggcatcatgctgggccataaagagctctttctaaacaacattattaatattaataataaaataaatgctcttaaaaatatgtacaaagtataaaagcatacatcctatcctacaaagacacaaaatgtctaacaaactcatgaaattctttcatctcagttagtaaataaatactaataaggacggtaatgagatagtatttttcatacatcaatggcattttttatgataccatccaatattggtgagggtgagataaaatgatgagattattgtttagtactttctttctgaaagataatctggcatatatatatataaagccataaaatatctataccaattggcctgataaatttacatctagaacttatctctaaggaaataactggagatacaaagaattatgtaaaaaaagatgcattgcagtgctgcttatgataataaagaagagttgaaacaaactaaatgtatgagaagaggagatgagttaaatagccacgggatggaaaagttaaatttaaagacaaacaaaaaatgctgaagaccattagggtccagaagaggccaccagaacttcccccagacctttggggattcaggatcacaccctcctttgccgttagggagatttcagtggaaaagttttaagaagcccttctcggcatgacgatctgccaccctgagattttaaaacctgggggagttgtttacatgcagaatgttccatttgcaatgtttacatgaatattcaatgtattaaagtgacacattttagaaaaaaaaccccaattctccttaaactttaaggttgacttgtatttttttctattaatatgcttaataaaataacacaaataataaatcatcaagagtcatgttttaaaagtcaactaatgacatgggaaaatgggctgtgttaaggaaaaaagacaggacacgatacatgtacagtatattttgatacacacatacactccaaattgtctaaggagtgatgagattaatgggtgactttcaatgttttattctataattttggattatttgaatcttgaaaaatgtgtagctgtcacttttacaagtataaaacaataaagctattttcattttgaaaagaaattaagcagaaatgagaaaaatgttatagatcttgatttccgtttttattttatttttggtgatggaattccttttttaaatgctatgttacacgagaactgaatctttgaacaaataaaaggagctctgttgaatgagattgacagatacagaccccaactgcttgccctcttcctgcctttcacctgacctttatattctcccctactctggtccccaacacctgaagcatctaccaagagcctcaaggcatcacagaacgcaattgtaaaactgttattctactagatgaccattcattggcatagtaagcctttcatgatatattccaatactccataagtgttaaaagtagattataaaataatttgtagggtaatatcctatgttttaaaactccacatgtgctatatacaattatatgtgtgtctgtatatgtgtgtatatagacacacacatgcacacacatatatatgcatgggtgtatatatatagatgtatatatacatctaaataaacaaaaaacgtttaaaaaatagtaaaaagaaatacactaaagtgtaaagtgtcgtatcagagccatggctgtatttttttgtatttttgtttttatatttatttttatattttataaaaacatttaattttatatatgtggaatacacacatatatatgtgtgatatgtgtatatatagagatgtatatatttaatgtatatatacatctaaacatttagttactaaaaagtagtaaaaagaaatacaccaaagtctaaaatgttgttgtatcagagccatggctatattgcttttgtaataagaaaaaaatgcattttaaggctgagcaggatttgagagagtgatttactcttgatgaagtctagtgtgatttttctgccaataagagatccaggtgacatttgagaattatgggtttaggtctaattactgtttttttagtagcagtagtttattcaggcatattttacatgcattaaaattctcgaatcctaagtgtagagccagattatttttggtacacatatagtcacatgagtataattattgttttgttgttgttcctctctttaatctttatatctgattctggatgatgcttaaaaaaaaaaaacagctttattgaggcatgcctgacttacaatcaactgcatatatttaaagtgtacaatttgatcagttttaacatggaaagaagagtcagttattcctaggtttcaatcttggatatggatctttcttgaccttagataaattatttaatctccttaagcctcacttttctcacctgtggctgatatacttaccttgcaggattgttgggaagactaagtaatgtgtgtgactcttcagtacagcccctgccatacaacaaccatccaataagataatggctgttgtggatctcatctgtttccaaacagggaacctaagattcaatgaggttagaaacttgtttacattcccacagctgggctgagaaagcagctgactgcatgacctgactcttcttgctggaaactcttaaatgtgtcttctcctgaggggctcccccgagcagtgtaagaatggccttgtactggccgtgaaactgggagaacaggtatctcctcagccctgttgctcccttgcctgtaactctgacttcacaatgagtgatagcaaccaatccgccatgttgcccctggcaaattgcccaactcaccaacctcagtttcctcatctgttaaaggaagaaattacatcaatggtggcaccttctggaggctactgagggatcacataagataacagttaaaatcaattcttaaagctctgcaattgttcaatagttagctctttgaaagaaaagaatgttggaattttgtagcagaaaggaccttgagaatcatctcgtgctagatttctagtccccgctagtgatgtactagtaatcatgttaattatcaaaacacctcccatatgtcaagggcctactaagagcactgctaggcagtttttcaggcatcacttcatccattcttcaccacaaccaggctacgtagacaatatcaaccacactttacagataagaaaccaaaatcctagagtttaattgtccaaagttacaaggttaagaatcttcctagtccacagcttgcccttctataacggtatatctcaaattctttcaggaaagaaagaacaaggaaacacttcttagctcatctcataactgcagcaagacctttataacaaagcctgtcaagaagactacaagcaatgagaattatagaccaatattactcatatagacacaaaaattcttgaaaaataaaagcaaattgaaaccagcaatatatgaaaaacatatcacaaccaagtaaggtttatcctagaaatgtaaggatgttttgacacttaaaagtaaattaatataattctccacatgaaccaaaaaaggagaaaaatcatgtaatgattatctcaaaatatgcagaaaagattgtttgatgaattcaacattaatccatgattgaaaacaaatgtaccagtaaatgaagaacaaaaaataatgttctcagtctgataaaagtcaataattttaaaatctgcaggtaacaaaatacataatagtaatacagtaaatactttctatcaaagactggtaccaaaacagggtatctgctgtaaccacttccataatgtagtgcactggctatcctagccagcataataacacaagataaagaaataaaaggtatacagattgtacaggaagaaaaaaagctgtccttgctcataaatagcataatctttaacgtataaaatcctaaaggaatctaaaatatgagaactaataggggaatttagcaaggattcagcatacaagatcaatatacaaaaatctattttaattatgtttactagtgacaaaataaaaaatgataaggaatatcatttacaatagcatctaagggtataaaattcttaaggatgaattttacaaaatatgtacaagatatctacacttaaaactttaggagaaattaaagaaaacataaataattggaaagctataccatgttcatggaatagaagcttaaatatcaattccgtcaatttaccagttcaaagcaatacagtgaaaatcccagctgatctttttatagaaactgataagctatataattcatttgaaaatgcaaaggacctacaatagtcaaaataattatgaaagaagaataaagttagatactttcaaactgattcaggggttactataaaattacagaaatcaagacacaaagtggcatggacatagtaaaatatatcaatgaaatagaacagaattcagaaatagacccatatatgtatgctcagttgactctgttgaaggtaattcaatgaaaaaagatagtcttttcaataaatggtgctggctcaatggatatatatttgaaaacaaaacaaaacaaaagcctcacatcataccttacactgtacatcattaagtaaaaatttaaatcacaattacagtcatgcattgaatataccataatggtcccataaaattataatattgtatttttactgtacttttttaatgtctagatacgtttatatacataaatactttctgctgtgttataactgcctacagtattcagcacagtaacacgctgtatggtttgtagcctaggagcaagagggtgtagcagtaggctataccatctaggtttgtgtaaatacactctatgacatttgaacaatgatgaaattgcctaacaatccatttctcagaatgtattcctgtcattaagtgacacttgaccatgtaaagtttttaaaagaaaacacaggagagtatctttgcaaccttagttagacaaatatttcctgaagaagacataaaaaacactaatgagaagaggagaggacaggagaggaaaggaggaaagaagaaaaaagaaagaaagaaacagagagagagagaaaagaaagaaaagaaagaaagagaaaagaaagaaagaaagaaaaaagaaaaagaaagaaaaagagaaagaaagaaagaagaaagaagaaacagaaaggaaggaaggaaggaaggaaggcagggagggaggaaggagaaaaaagaaagaaagaaagaaaagaggaggagaaggaaggaaggagaaagggaaagacagagaaaggaaagaaagggagggagggaaaagaaaagacaagaaaaagaagttgctacattggaccttaacaacactgaaaacttccctttgaagacactaatgtgaaattgaaaagacatgccacacgatggagaaaatacatacatctgacaaatgacttatattcaaaatataaaaggaattcttacaagtcaatactaaagagggcaaaataactctaatagccacttcctaaaaagacacacagatgatcaataagcacctgaaaaaatgatcagcattgctaatcatcaacaaattgcaagttcaaaccacgatgtgatgtaacttcatacattaaaatagctaaaagttaaacaaagaaaactagcaagctctggtgagcatgtggacaatcggaattcttgtagtaggtacgtaaatggcataattactttggaaaaatgtttgtcagtttcttacacagttaaacatgcatctacctgcgacccatcaattttacttctggaaattcgcccaagataaataaaaaccacacaaaggactcacaaagttcacccaaagacttatacacaaacgtgcctgcagttttttgcaccacagcataaatctggaaacagtcaaaaaatctatcaagaggatggataaatgaattatgtatttattcactgaaataccacttaacaatagaagaaaacaaactgcggatacctacaaaagcatggataaatttcaaaaacaatttgttgtgctagagaagctagacacaaaagagtgtatactgtacacttccgtttatataaagtccttgaaagggcaaaacaaactatagcaagagaagtcagatcaaggattgcctggggtaggtaggaagtggtgaagattgactaccaagcgccatgagaaaactttgtgggataacagaaacgttcaatattttgactggggcggtggttccacgtgcatatacagttgtcaaaacttatcaatgtgtacatttaaagagcatgcgttttgttgtgtgaaaataaattgtatgtgaataaatgtgattttaaaaaataataaagttctccacatatttcttaggtcccttaaagagtgagcactgcttgtcagtgccagagcctctgtctcattaatcttttaatcgcagtctatacaatatctggcacttggtaagtgctccccaggtagagtttgagagaaggtaggtcgggagagcacgcattgttggaggggtgtgaggaggaacagaacacaagcaggactagacaaatatgctcttctgctagaaacctctttcaccataaggtggcagcagagagcacctggcaatgtctttacctacttaatccagcaggtgacagcagacccacactaacctctacacgaagttgcattttcccctctctttcctacggttaccacaatctcagcccagccactccgccaggcagaaaagggagacttaaatggaaaagaataagaacatacccatgatccccatatatgacgggcactgttctccatgcttaataggcaacatgtaattatacttaatgtaatatccatgcttaataaacagtatttcatttccatgcccatcctttatcatgggtatgattttctttgttgtaaagacaagtaaacaaagcttcagagaaggagaacatgttcctaatcacggatctagaagtgatagcgatggagtttgagtctgctttttctttccatgtcatcctgtccaaacctatagaccaaaatgatccatacagaggttatgtattggtgttcactgcagcagtgttctaactgctcatgtgcattagctcatgtaatcttcacaacgagttgaggtaggaacagttgttatccctatttattttatttatttatttatttatttatttattgtgtttttgaaacagtgttactctgtcacccactctggagtgcagtggtgcgaccataggtcactgcatcctcaaacttccaggctcaagcaatcctcccacctcagcctccagagtagctagggctacaggtgtcagccattgtgcctagcctggttatcgccattttaaaggtaggcagtgacactgagacactgataggttaatgaacttgtaaagttcacatcattagtaaaagctgcagctgccactggagttcagggtctgaccctgaaccttaatccttcactgcagaactagctaccaagtgaccactttgacgagccttgaggaaaaggcggagggggctttagcacacactcagctaacgaaagtgtgccggttcatttcccacagctccacacaaactcccaggggtagtaaagaatagcttctccctcctctgtgtccctgagaagtcccaggggcattcagagatttactgtcatccctgtccaacccataggagtcttctaagacccatgcttcttcacccatctagccagccagcctttattgagtacctactgaatgccaagccttaattatgaaaacacagagcctttcttcaaagagctttcatactgaggggaagatcacatgcaaaagcaagcaaaagcaaaactgcagagagatacttctgctggtgactaattaccatgtggatggcgcagaatttctgtctagtcagggaggacttcctgtaggaggggaggtcttccactgagacttagagggtgagtaaggcttgaagagatggagaaagaagtcaggatacagtcttggcctgagtgaagaggtttagtgagaatagagaggtcagctaggccagagggagggtcttgggaggaatagctgaaaatacaactggaggggttggttgggggcatattgtggaaggtcttgagggctcagatgagagcctttttgtatctcttaaactgatggcttatgaatggctggaagccattcaaagtgcatagaaagagagtggcaagaggaagccagttcctaggaaattaacataggcaagcctgtgcaaaaaggaatggaactggggagcctgcaggggcaagaagaagggacctagtccatgtggaatgtttcctatgtgtcaagtacttagtatttagcctacgttatgacagctaattctccgtagagccctgaaagatctgtgcagttatcatctctggtttataaatgactaaaatgagacacagtgaggttaaacatgtttctcaaggttacctgactaaaaccaaaaaagctgagtttcaaactcccacaacctaacaccaaagctcgctttcttaaccactatgctcgactgcctttatatcatgggtcatgcaaaatccaacctaagtctaagagatatttaacctcatctgagacatctatcaggttggaaaacatttagggctcttccctgaaagatgccactgtgctcaaaataggcaatgtctctaaacgaataattagagaggcattctcagtgttagaagtgtggaaagctgaggaccatgcctggcttgtgaattcagaggctatagtaataaatacttgatagtgtttattcttttaagaggctgatgggaatcacagtggccctcaggagagagaagccatcagagaagggcagcagtggtgccaatgctaaacacctccatcatctcttccttgaaaggcagggagggcataaataccttgctgccacactggaggcgctcaggaagacctggaataattggagagaaagcactcctaaaagcaagtagaaactgcctgcagctcttttggtgtggttggatgtggttgcagatttatctggcttatcttctcaggcatagaataattgctgtcctgcagggcaagctccgaagagatttccccagaagcaagcagagtcctgtctaaagcagaaatagccatggcatagcagcagcaccaccccgcggagttagctactagcgctgtcacgcatgttggagctactgcaggaagaggtggcagcatggggggaaagaatgggaggtatcaggtctgcatggaagaaaactggaaacaaagccactggctcgtgagagtttgaagctcatgagaatttagggaaaacttccacatacacggctctgtactcttcagctttcagagctccagaagatcagagtccagggtggaatctgtcattgagagaagagacttggaagacagtggctgcagggaggaaagtgatggcattgtagtgatggagagcttagcccttgtctgaatgaggctctgacaggtgtggtcacctatgacaaacccgtgggtaatgtatacaagaaggctgatagttgtggcactgagccatcttctaaaaagaccacatttgaagggaagaagaaaccttgctcagtgagattaatcaagcaaggacttcttggttagggaaggcaaactgttttgatgcattggtcaggataggctaggttgtgctgcagtaacaagctatccccagacttcagcagtttttaacataaatgttcctttctcactcatccaaagcacctttctgggcaaggactctgtttttcatattccatcagggacccagcatctgggatgtcaccagttgctgagtcaaggcaagaaagaactaagtgtcctgggctttaacgggaagtgatatcacttctagccacggattggaactagtcacatggacccaattaatgcaagggcagctggaaggtgtcaaggagcagagtggggtctggtgagcaccaccttctctggcgtgcttagcagagtctggtgtctgtcattccaagaaatctctgactgagctcctaaggatctatgacttatgagcccctgggggactccaaataaaaactaaaagaatcattttactaagaattctgtgaggcattgaggtagagccacactgcctggacactgcttctttggacaagcctcacacaaagagggaagatgcatgccctcttcctcagaaacaactgtacatcatggcattcaacataccaggagcagtggcaccagtgatccccaacagaatgccactagccttctcagagcagaggcagagcctggcataaatggatgtgtctgtttgagtgttggcagcacatgagagccccactgggtctgattgtgcctggggactatttcagaaagctaagatctttgttatgcatgtggagaacaagagctggagatggtgacctcctattgagtctaataagactggtaacactgattggattatgtccatattacagatgaggaccttgaggtttggggaaattaacggcctttccaaagtcacctggttaatgcatggcagagccagagcctgttgaccctattgcatgatttgaaatcatcatgtttgggaggcatgcactgtgtaagaagacaaggaactggagccaggatgccaacttcctgagtgaccttgggcacattatttgagggcctccatttctctatttgtaaagagtaaagctggatgagatgtctcaaagtcttttctgttcccactgaaggtctgttgctgcaaccccattggagctgatgacagactccatcagctggaagtctgctcaacctgctccacctgctctaccacctccagtacctggaagtccaaaattaggagaacagagcccacggcctcatgccaccacacctgctttcaccagctcctggagaagttggacagctagagaagggaaagcatgctgggctggagcccagtggggtcacactgtgggctccctgctactgtcctctgctccaacctggccagccaccagctcggccctggggtggggagaggtggcatcaacagtcaggagctgcagcctgggggctgccctgccctgcaaggcttcttgctgtatgtcattcttgctgtatgtccttgcatgcggcctggccctgccttaagcaggggcctgctcctgacaagcagctcagctagggaggagaggccattgcagcagatgggcggatgaagaccaggtgggagcatgaggccagatcacgagagtcctgagccccccatggaagaccgttccaggccatccctggccctgagtgtcatctcccactatccctgtcactaaggtcccccataagtttgactttgcaagctccctccccgagatttaggcatccttgggacttagctcctctctctagcacccgcgtgcacggagtcctccccatcgccggagcatgagtccatgcttgagactaagccttctccccatgcctggcactgagtgccatccacgttatgatgtgcaactgagccctgacattgagtggcctttacctacctgacacctagcacccctgatgtcccatagttagtgcttccctgatagaagaatgcctcttatcctcctcagcaggtggcctccctcccactttggcagtctcttgctgtgaccctagccccacttggcgtgtcatctcaccattacagccttagctcctctgttcaaatgtagccagcacctactgaagttgtaccatgtgacagtgatgttcaatgctcttgttaaacacacaaaccaggctcccaagcttctgtctgtgccctttctcctctactgcatgccctcattcccctcggcacactgaattctccctgggtagcctctgcagttctgggagaaccagtacccatcagtgctctagggctcccaagtcctgcagccttctgggaatgcctttcctttcccatctgccatcacactaatgataatagtcggccacctccaggatgccctaggattcccaaggtattacattctttgtggcttttttcacttctgagtcagaaaggctactctgagctttccctctcacctctgaacacttctgcaagccagacttgaacccaacatttccaccaccttcctcctgggccttccctactgcaaagctaactcaaggttgggtgatgtcacttgtatcatgaaggtttcagcaattgccatgtgggagagaaaacagctgaatgttaaataccaggttccattcttgagtcaatggtcaccttaaaccccaacctgccctaggaacagagccccttctgccatctctttctttttttttttttttttgagacagagtcttgctcttttgcccaggctgcagtgaagtgatgtgatctcggctcactacaacctccatcccttggggtttaagcgattctcctgcctcagcctccaaagtagctgggatttcaggtgcccgccaccacacctggctaatttttgtacttatagtagagacacagtttcaccatgttggccaggctggtctcgaactcctgacctcaggtgatccacccgactcagcctcccaaagtgctaggattacaggcatgagccactgcactcagcctctgccatctcttccttcccttgggacccactccagcacttacgccctttaatagaaaccaaaatgccactcacccaaaagtaacctcaagcaaggaagttgtccttccactttcttacccccagaaatgacctctttatttctcaccctccccttcctcatgaggccttgagatctgaaactgctgaacagcaggggccctgaaagtgtttttccaaatggaataacatgcttccttcctcatccagtgagctagaaagtggctgcagtttgtttgcagtagcagttttttgttttttattttttaccgctgcacatacattttcaaagacatggacctcactgaccctcccagcatcatttggcttcaggccacatcacctacaccacttcttgacagagccaagagtgatgctggaaggggaagcaggaagcagaagaagaaagggacccagaacagtggaatgcaggagctcaggggccacgcaggagtgtggttctgcgtctggcccaggcacatcacacctgccttgggcatagtatcctcaaacctgctagttgaggggcgggaaaaattcacagaatattttagtgatttcttgctcagataatctgagatttgcctctaaatcatgaaagtgagcctgaggccaagcatcaggccttcagggaattgagattggacacaatgataaacttgaattcccagcccaataaacttatctctctggcaggaacttgcagaggcaagtattccagaccaagctttgaaggaacacagtggaataagaaagcaagaaaataaaaagttgctgtgtatcacttgtatgccaagtaatattcatctattatatcatagcattataaaattgagatataatttatactatgccataatattcatccctttaaagtgtacagttcagtggttttagtatatttacaatgtcatgcaatgaccaccactgtttaattccagaacatcctcattacccccatacttctttgcagtcacccctacctcttcccagtccctggcagccactactttgtatcttctcagattagccttttctgaatgttttacataccatatgcggtattttgtgataaatacctttgacttagcatagtgttttcaaggttcatacatgtggtggtatctttaatcttttactcatttttatggctatacaatactctattatacagatatatgacattttatttatccattcatcagttattgaatatttgcattccttctaccttgggctattatgaaaaatgctatgaacatgcatgtataattttttttatatgaacacatgttttacattttcttgggtagatacctagggtagaattgcagggtaatatggtaactcaatgtctgcctttttgagaaactgccaaactgttttctgtggtggctgttccattttaccttctcaacaacaatgtatgagggttgcaatttctccatattctcaccaatacttagaaatgttcatcttttttattgtagcccttcttgtgggtacgaagtggtttgtcattgtggtttcgatttgcattttcctaatgactaatgatgttgagcattttttcatgtgcttattggtcatttgtgtatcttccttgaaggaatgtctattcaagtcatttgtccatttaaaaaattgggttgtcttctattgttgcattgtaagagttctttaaatatcctggatacaaaactcataacaaacatgattcagttatattctcccattctgaagactatctttttactttattaatagtgtcctatgaagtacaaaagttttcattttggaggagtccaatttaactgtttttttcttttgttgcttgtgcatttagtgtcatatctaaaaaacattgcctgatctaaggtcatgaagatttactcatatgttttcttctaagagtttaatagtcttatcttttacatttaggtctttaattcattttgaaataattttttatatggtatgagccaggggcctaactttatttttttgtatgtggctaactggttgtcccagcaccatgcagtgagggactattctttccccattgaattatcttggcacccttgatgaaaatcaattgaccatgagtgtgagtttgtctctgaattctcaatgttattttattggtctatacatctattcttatgccagtaccacacagttttgattactgtagctttgtaataagtattgaaattgttaattgtgagtcttccaacttagttcctctttctttttttttttctttccttttttttttttgtgagagggagtctcgtgctgtcactcaggctggagtgcagtggcacaatctcagctcactgcaagctctgcctcccgggtttacaccattctcctgcctcagcctccccggtagctgggactacaggcacctgccaacaccacgcctggctaattgtttgtatttttagtagacacggggtttcaccatgttatccaggatggtctcgatctcttgaccttatgatccacctgcatcggcctcccaaagtgctgggattacaggcatgagccacagcgctcagcctcttagttcctctttcttaggactcttgagtattctagttgcttgaatttcaatataaattttgggagcagcttgtcaatttctacaaaaatggcagtgatattttgatagagatggtgcttaatctgctaaacaatttgaggagtatgttagccagagttcttcagagagccagaaccaatgggatacataggtagaaagattagattagattagatagatagatagatatgagagggaatttattagaggaattagctcacatgattatgatggctgagaagtcccaccacaggctgtctgtaagctggagacgcctggcttagtccaagtccaagggacccagaatcagagaaagcggtggtgtaactctcagtctgaggctgaagccctgataacctaggggggcactggtatgagtcctgaagtccaaaggccagggagcctggagttctgatattcaaggacaggagaggaagagtgtatcccagctctagcatatagatggacaaatacacttctgttctgtttttgttcattctgggcccctgccaactgaatagtgcccacctacatggagggtggatattttccacctcgctcagtaagaatcacatgctaatctcctctagaaacatcctcacagatacactcagaagttatgttttaccagctttttaggtattccttaatccagtcaagttgactcctaaaactaaccatcataaggagtactgccatcttaacaatattgttttctattccatgaacatgtttttttttgtatgcttaagtcctttttaacttatttcattgatgttttgtagttttcagtgtacaggttttgcattacttttattaaatttactcctaagtactttattctttttggtactattataaatggaattgtttacttaacttcactaaatttccaatgtataaaaccataattgattttttctttttattttttatttttattattttttttattatactttaagttctagggtacatgtgcacaatgtgcaggtttgttacgtatgtatacctgtgccatgttggtgtgctgcacccgttaactcttcatttacattaggtttatctcctaatgctatccctcccccacccctcaccccacgataggccctggtgtgtgatgttccccatcctgtgtccaagtgttttcattgtacagttcccacctatgagtgagaatatgaagtgtttggttttctgtccttgtgatagtttgctcagaatgatggtttccagcttcatccatatccctacaaaggacatgaactcatcatttttatggctgcatagtgttccatggtatatgtgtgccacattttcttaatccagtctatcattgatgcccttttgggttggttccaagtcttggctattgtgaatagtgccacaataaacatacatgtgcatgtgtctttacagcagcatgatttataatcctttgggtatatacccagtaatgggatggctggatcaaatagtattcctagttctagatccttgaagaatcgccacactgtcttccacaatggttgaactagtttacagtcccaccaacagtgtaaaagtgttcctatttctccacatcctctccagcacctgttgtttcctgactttttaaatgatcgccattctaactggtgtgagatggtatctcattgtggttttgatttgcattcctctaatggccagtgatgatgagcattttttcatgtatctgttggctggatctatctcttcttttgagaagtgtctatttatatattttgcccacttttcgatggggttgtttggtatttttcttgtaaatttaagttctttgtagattctggatattagccctttgtcagatgggtagattgtaaaaattttctcccattctgtaggttgcctgttcaatctgatggtagtttctcttgctgtgcagaagctctttagtttaattagatccaatttgtcaattttggcttttgttgccattgcttttggtgttttagacacgaagtccttgaccatgcctatgtcctgaatggtattgcctaagttttattctagggtttttatggttttaggtctaacgtttaagtctttaatccatcttgaattaatttttgtataaggtgtaaggaagggatccaatttcagcttctacatatggctagccaattttcccagcaccatttattaaatacggaatcctttccccatttcttgtttttggcaggtttgtcaaagatcagatggttgtagatgtgtggtatcattaccaagggctctgttctgttccattggtctatatctccattttggtaccagtaccatgctgttttggttactgtagccttgtagcatagtttgaagtctggtagcatgatgcctccaggtttgttcttttggcttaggattgtcttggcaatgcgggctcttttttgatttcatatgaactttaaagtagttttttccaattctgtgaagaaagtcattggtagcttgatgggaatggcattgaatctataaattaccttcggcagtatggtcattttcacaatgttgattcttcctatccatgagcatggaatgttcttccatttgtttgtggcttttatttcattgagcagtggtttatagttctccttgaagaggtccttcacatcccttgtaagttggattcctaggtattttattctctttgaagcaattgtgaatgggagttcactcatgatttggctctctgtttgtctgttattggtgtataagaatgcttgtgatttttgcacattgagtttgtatcctgagactttgctgaagttgcttatcagcttaagtagattttgggctgaggtgatggggttttctaaatatacagtcatgtcatctgcaaacagggacaatttgacttcctcttttcctaattgaataccctttatttctttctccgccctgattgccctggccagaacttccaatactatgttgaatacgagtggtgagagagggcatctctgtcctgtgccagttttcaaagggaatgcttccagtttttgcccattcagtatgatattggtggtgggtttgtcatagatagctcttattattttgagatacgtcccatcaatacctaatttattgagagtttttagcatgaagcgctgttgaattttgtcaaaggccttttctgcatctattgagataatcatgtggtttttgtcgttggttctgtttatatgatggattatgtttattgatttgcgtgtgttgaaccagccttgcatcctagggatgaagccgacttgatcatggtggataagctttctgatgtgctgctggtttcggtttgccagtattttactgaggattttcacatcgatgttcatcagggatattggtctaaaattctcatttttgatgtgtctctgccaggctttggtatcaggatgatgctggcctcataaaatgagttagggaggattccctcttcttctattgattggaatagtgtcagaaggaatggtaccagttcctcttttacctctggtagaattcggctgtgaatccatctggtcctggactttttttggttggtaaactattgattattgccacaatttcagctcctgttattggtctattcagagattcaacttcttcctggtttagtcttgggagagtgtatgtgtcgaggaatttatccatttcttctagattttctagtttatttgcgtagaggtgtttgtagtattctctgatggtagtttgtatttctgtgggatcagtggtgatatcccctttatcattttttattgtgtctatttgattcttctctctttttttctttattagtcttgctagcggtctatcaattttgttgatcctttcaaaaaaccagctcctggattcattgattttttgaatggttttttgtgtctctatttccttcagttctgctctaattttagttatttcttgccttctgctagcttttgactgtgtttgctcttgcttttctagttcttttaattgtgatgttagggtgtcaattttggatctttcctgctttctcttgtgggcatttagtgctataaatttccctctacacactgctttgaatgcatcccagagattctggtatgtcgtgtctttgttctcattggtttcaaagaacatctttatttctgccttcatttcgttatgtacccagtagtcattcaggagcaggttgttcagtttccatgtagttgagcggctttgagtgagattcttaatcctgagttctagtttgattgcactgtggtctgagagatagtttattataatttctgttctttcacatttgctgaggagagctttacttccaactatgtgatcaattttggaataggtgtgctgtggtgctgaaaacaatgtatattctgttgatttggggtggagagttctgcagatgtctattaggtccacttggtgcagagctgagttcaattcctggatatccttgctaactttctgtctcattgatctgtctaatgttgacagtagggtgttaaagtctcccattattactgtgtgggagtctaaatctctttgtaggtctctaaggacttgctttatgaatctgggtgctcctgtattgggtgcatatatatttaggatagttagctcttcttgttgaattgatccctttaccaatatgtaatggccttctttgtctcttttgatctttgttggcttaaattctgttttatcagagactaggattgcaacccctgcttttctttgttttccatttgcttggtagatcttcctccatccctttattttgagcctatgtgtgtctctgcacatgagatgggtctcctgaatatagcacactgatgggtcttgactctttatccaatttgccagtctgtgtcttttaattggagcatttagcccatttacatttaaggttaatattgttatgtgtgaatttgatcctgtcattatgatgttagctggttattttgcttgttagttgatgcagtttcttcctagtcttgatgatctttacaatttggcatgtttttgcagtggctggtaccggttgttcctttccacgtttagtgcttccttcaggagctcttgcaaggcaggcctggtggtgacaaaatctcttggcatttgcttgtctgtaaagtattttatttctccttcacttatgaagcttagtttagctggatatgaaattctgggttgaaaattcttttcattaagaacgtgaatattggcccccactctcttctggcttgtagagtttctgccaagagatctgctgttagtctgatgggcttccctttgtgggtaacccgacctttctctctggtggcccttaatattttttccttcatttcaactttggtgattctgaaaattatgtgtcttggagttgctcttcttgagatgtatctttgtggtgttctctgtatttcctgaatttgaatgttggcctgtctttttaggttagggaagttctcctggataatatcctgaagagtgttttccaacttggttccattctccctgtcactttcaggtacaccaatcaggcgtagatttggtcttttcacatagtcccatatttcttggaggctttgtttgtttctttttactcttttttctctaaacttctcttctcgcttcatttcattcatttgatcttcaatcactgataacctttcttccacttgatcgaattggctactgaagcttgtgcatgtgtcatgtagttcttgtgccatggttttaagctccatcaggtcatttaaggtcttctctatgctgtttattctagttagccattcatctaatcttttttcaaggtttttagcctctttgcaatggattcgaacactctcctttagctcagagaagtttgttattaccgatcatctgaagccttcttctctcagcttgtcaaagtcattctccatccaatttttgtccattgctggtgaggagctgtgttcctttggaggagaagaggcactctgatttttagaattttcagcttttctgctccggtttctccccatctttgtggttttatctacatttggtctttgatgatggtgacgtacagatggggttttggtgtggatgtcctttctgtttgttagttttccttctaacagtcaggatcctcagctgcagatctgttggagtttgctggaggtccactccagaacctgtttgcctgggtatcatcagcggaagctgcagaacagcaaatattgcagaatggcaaatgttgctgcctgaacattcctctggatgcttcatctcagaggggcacccagctgtatgaggtgtcagtcggcccctattgggaggtgtctctcagttaggctacttgggggtcagagacccacttgaggaggcagtctgtccattctgagatctcaaactctgtgctgggagaagcactactctcttcaaagctgtcagacagggatgtttaagtcttcagaagtttctgctgccttttgttcagctatgccctgcccccacaggtggagtctacagaggcaggcaggccttctcaagctgcagtgggctccactcagttcgagcttcctggctgctttgtttacctactcaaacctcagcaatggcagacacccctcccccagcctcactgccaccttgcagttcgatctcagactgctgtgctagcagtgagtgaggctccatgggcataggaccctctgagccaggcatgggatataatctcctggtgtgccatttgctaacaccattggaaaagtgcagtattagtgtgagagtgtcctgattttccaggtaccgtctgtcacagcttcccttggctaggaaagggagttccctgaccccttgcccttccagggtgaggcaatgccccactctgctccgtgggctgcacccactgtctaacaagccccagtgagatgaacctggtacctcatttggaaatgcagaagtcacctgtcttctgcatcactcacgctgggagctgtagaatggagctgttcctatttggccaccttggactgttttttccatacttgatttttgtatattgagcttgtaaatcctgcaaccttgctgaactcatttattaactctattttttattgtttttttttagagttttattttattttttaaaaatagagatgagtctcactatgtttcccaggctggtctcaaactcctgagctcaggtgatccttttgcctcagcctcccaaagtgctgggattacaggtgtgagccaccatgcccaactcacttattagctctaatagagatttttttgtgggttctgtagggttttctatatacaggatcatgtcatctgcaaacatggttttacttcttcctttccaatctggatggcttatatttattttctttgccaaagtgacctgaatggagtccccagcacaatgctgagtagaagtgttgagaacagacatccttatcttgtttctgatcttatggggaaagattttactcttctgttattatgtatgatgttatctgttagctgttcatactattgttcgtagtatttccttataatcctttccctttctgtaaggtcagtagtaatgtcatttcttctattccttattttagtaatttggaggatgtttcttttttttcttgattattctagtaaatgtttgtcaaccttgttgatcttttaagagaaccaacttatgttttgtctattttctctacggtgtttatattctctattttctttacttttgcttttatcattattatctccttccttctgtgagcattgggtttagtttgctcttctttttctagtttttaatatggaaggttagattttttaaatttgagagctggtaaatccaacatctggatttcttcagggacagtttacattgacttcttttgttgtgttttattttattttcctgtgtagatgccctaatttttgtttcttttcatgtcccataattttggttagaaactggactttttttaaaaattatactttaagatctgggatatatgtgcagaacgtgcaggtttgttacataggtatacatgtgccatgggggtttgttgcacccatcaacctgccatctacattaggtatttctcctaatgctatccctttcctagccccccacctcctggcaggcctcagtgtgtgatgttcccctccctgtgtacatatgttctcattgttcaactcccacttaggagtgagaacatgcagtgtttggttttctgttcttgtgttagtttgctgagaatgatggtttccagattcatccatttcgcagcaaaggacatgaactcatctttttttatggctgcacagtattctatggtgtatatgtgccacattttctttatccaatctatcattgatgggcatttgggttggttccaagtctttgctattgtgaacagtgctgcaataaacatatgtgcgcatgtgtctttatagtagaatgattaataatcctttgggtgtatacccaataggattgctgggtcaaatggtatttctggttctagatccttgaggaatcaccacactatcttctacaatggttgaactaatttacacttccagcaacagtgtaaaagcgtttctatttctccgcatcctctccagcatctgttgtttcctggctttttaatgattgcctttctaactggtgtgagatggtatctcattgtggttttgatttgcatttctctaatgagcagagatgatgagctttttgcttaagtttgttggccacataaatgtcttctttgtgaagtgtctgttcatatcctttgcccacattttgatggggttgttcgtatttttcttgtaaatttgtttaagttctctgtagattctggatattagccctttgtcagatggatagattgcaaaaattttctcccattctgtaggttgcctgttcactctgatgatagggaagctggacattttaaataatataatatggcaatcctgaaaagcagattctccatgcaaattttgttgttgcattttatttgcttttatgttcaggtttaatgacttttacaagataattctgtaaagtctgcattttttgtcacatgtggccactgaaatctcttatcagcttagtgtttagctagtgactggatagaaatttcctcagacacttggggccagtaagtctttcagtctttgccagggagctctgtgtgttggggctcactttcaacaacagaagggctgtttacaactctgccctagtgggctggacgtggtggctcacacctgtaatcccagcactttggtaggccaaggtgggtggatcacttgtggttaggagtttgagaccagactggccaacatagtgaaacctcatctttaataaaaatacaaaaaaaaaaaaaaattagccaggcgtggtggcaggtgcctataattccagctactccagatgctgaggcaggagactctttgaacctgggaggcggagcttgcagtgagccgagatcacgccactgcactccagcctgggtgacagagcaagactccatctcaaaaaataaaaaacctactctgccttagctttcacttcctgtttgctcagtgcctcaaatttagtcagaggtgagagcttagggtcttttcaagtctttctgagcatttatacagccctaagcaggtacaatgtcatatgtatgtgtgtggccttctagattttgcatagctttgtgaggtgttgataatatcactcaatggtctttgaactgaggctgaaagatattaagagacttactaaagtactccatcaagcagtgagagatgccagatttaaatccaaagttatgctctttcttttccaagaagcaagacctctgcaacttccatgggtgttcctcttctgtgctttttggcaatcctagctttcacccagcatggaattcctccataccaagtttgggactgaaagatgagctcttgggggttggcaagtgtctggggacagagacttaaagccaaagctgattgtaagaaatctcaaggatgggggaaggaagtcttgccccatgtgtgatgagtgagagacaagtaactgcctgtgcatctgaggactgggaggacatttggggccatcacagatgactgtagtcctttttaagagccaagtcatttcttgggcatgcattacagggacctggccctatgacaaacacttagactacagtaggtctataaaacagcaaaaaggaaataaacaaacaagcaaatctcagccaatgagttactgaagtggcgtatgattttagagtctaagatcctaactccaaagatctaccaatttgtttttcttgagtcttttccatggaatcattgacaggtggtcaccttcaataacagggaacatattactttccaatcaactcattccttcttcaggctcctctgcttgtagatagagaacccaatacagtggagggagcagactcctctgacttccaagcttttgttcttggcttcaacccttttaatccatgtggctttgccaagtcacttcccttctttaagtctgtttcttcatctgaaaaatggagaaaaaaaattcctgcttggccaggttgcttgagtgttgatgacataaagctattgaacttacctggtagaggagcacaatagcggtagccattgttgaagttcttccctctaagaaactaaaatctttgtcgcagcagttttcacccaatgttgttaattctgctcctttagaccacttccccaactcatgctttcagattactgcatacagtgactgtattgcctctttttgggtaggctaaaccactccactctttaaaaacactcctcaattatatgaccttaactccttttaccacccaatttcctctcctttgaagataaggcccactctctccccagctcataatgtgtgaaggttttcaggctgtcctggccagcagaacaagaagagtgagatccactccctcattccaaagcttatacttcttgtaaagcaacccaagctcaccttcattttcctattatgctcaccttcattttcctatcctgggtcacatgtttgcacctaaatttgtgaagtacaaagtcagtatctttcctatccctgctaaaatgcatcttgttagagacagcacagtgtcccaggctgctgagacctcgattctcacatctgtctcaaagcctataaattggcaaaaataatgagaatacatcgtattacatcacccaagttctcctcactttcccacactcttctacccaccaatcgcaaatgtcctgggtagatgagcacctgaggctattttaacaagattgagagtgaagcctggaaaatgcttaatttaaacttaaacccacaagtatttgttgagtgcctgatatgcagcaggcatttgcaaacacagtcttctgaccttcacaacactcctcagtgtggagtatcataaacccattttacaaatgggaatcaaagaagtcaagcaatttgtacaagatcacatagctaataagcttcaaggatatggcacaagtctgggaggtttgtttgactccagaacccatattattttcctatcttgtctaggtttctcatgctgctaatggagtctataagcagttcttaaagtgcatgcaaatcacctgagaaatatgttaaaaatgaaagtccaccctcaccccccacattctgattcagtaggtctggagagaggctcagtcacctttaagaaatgctaggtgattctgaggctagtggttcacagacaacacctgccttgccagctcagctactgggcaccaaaagtcaattcccaaatattgcttttggaccagcataaataataacagccagcctttcctagctgagagagatggtcagagctctcctcagccattgtctctcattgctcccatgggatttttcagcctagagcctaaatattgcctccttctgtgacttttgacttgctttctagatctggccagaggaagcaagaaaccctaggtgtggatgttgcaatggcagattatgtaacacctctggagtgctccctgcatcacataatctctgacagtggaaatgagaccttcccaggctgcctgtccatgccttgtcccaaaccatgaaaatgtacatagagcaacaaatggctgcttggcgcaccatggcccataatcactgcttcccatccccctcacaccaagacactgcatcagtcaccattggcatttaaagacatttgcttcactgatcttctaccctcccctatctttttgcctgtggtcatccagggctgtttcttaaagtcacccctctcggtcatgagattaaaaagagaaaactgcctcttccttccttttgggatgtgagtaatgattgaatccttcttggggttagcatgccgcaataaggtttccgcgaaaggatctgaagtttaataagctcatgggctctctgactgcattttgtttgttctacatggcatgaaaaattcagagaccaggctaaaatgtctatgtaacttagaataaactaccttacctccctgaaatctagttcctttatcagtaaaatagggataacaaccgtaactgcctctttgctgttgagatcattgaatagaaacgtacgtacaaagagctcagcaaagttgtggcacggagtaggtgctccatgcatattgtcattgttctctacatcttgctacacacagtgcagtccccaatgaggcagcatctgcatcaccctggagcttgttaaacatgcaggatttcatccccatcccagacccattcaaccaaagtctgcatgttaacaagttccccaggaattgcaacccacattgaagcttgaggagcagtggttagatcactatccagcagggtgagaaggctgggaatggggacagtgacagctttctagctaacatttttatctttttgcactgcttgccacccctgccacccagtgccaaattcacattccatcttcctgtatgagtgatggtactaaaacagaactctggcctcttcactcttgcacatatagatggttccctgatgcctaaaggataaaggaccaactctgtggagtggcacgcaaggcccatcagcatctggccagatcttgtcttttcatcattgttcgatgcccactctacagctgcagatactgtgctgtggctacaatgagaaatgtctgtcattcccaaaggcagccttcactttcaggcctccactcctcattctagagatggtcccttccccaagggacactcggtcctctcatcacctccaagtttcctcatgctccacttcctggaacgttctctgcctccaaaaccctgttcagcattcaaggctcggctccactgctattttcagaatatgtgcagaccagtggccaggtataaaatgcccatgatggatgaatatcttagatgggttcttccttggcccatcggcaactatttaaatctccttgggcatgtcacctaaacttttgagcctcaagcactccttccaatcccagctgggtgaagaagataagaaaggtgccaacctcagagaattgttatgaggatccttgggggtcactatacctaacatagtgactggtacacagtaaatgctcaataaaaactagctaagcccactacagtataaacctactacagtgcaatttccataaagtgcctgggtttgttttctttaccaatataatcccagtacctggctcagtttctgatacacagtatatgctcaataaatatttgctaaataaatgaatgcctaaaatgtgttatgcaaattgcaaagctctgtcttgattgtttttgtaatcaagatttagataacttgataaagagaatgagaggaagagatcataaatatattattattgttaattgctgacttatggctgtcttccagatgcatatagacaggctatggctttttcatgcacgattctaagaatacacaacacgggtttttttcccattatttcaacatcttatccaatctgttttcagttcccccatcaccataacaacttgcacttcccataataactgtttagagctgcaatattctcttgatcccctgcaatcaccaattaggctctaaaaactccattactctgtccaccttcaagcttctaggaggtctgtccttgatcatcctccaatctcaaaaatgctgacatcttcttttctaggaaaaacaatgaaagaggtcctgtgaagatataggccaaacacctgaatgagagataggagataagagttgctttataaaggagcctttaattaggaagacaagcacaacaaaagaatggaaataaccctttcccaacatgattaccatcatctgtttcttccaggccaacagtgatgtcctcacccctcacactctgccaagagtctttctcaaacaaagagacttggactgaagaggctgaagatggcctctatcccagggaatctcagatgttaatacacacagcttgttaagtggtggaatcacctgcaaatattgtagtggcagattctggaagttagtagatctgtgggggaacctgagattctgtgtttcccaaaagctccgatgttgctggtgtgtggaatatcctttgagcaacaggagcttactctatctctgagctatgaataccatcattcttctggaaatgtatgagccaagtcctcactaaataacttgtaacttttttttgtacacttactgtatggtaggcagtgtgataggcatttcaactagcttactcgatggaatgtattcacaaccccattttatagatgaagaacttgagtctcagggaagtgaaatgagccttcttaattgctggtctttcattccttgggctgtggaattgtgggcttgagcttcagctgcggaagctctggctatgaacaagaaccactctcctgagaacaccaggatactagtgggcatttgtcttgtgcatttccatttctgcccctacaagacaatctccatgatctgaaaatgatttagcacccacttgctattactcacacaggttcttgtggataaaacttcctcaagaaaacgggcttcaagccacctttgttagagttaccaaagatggttagaataaacgtgtatttgtaacagcatgttgtaagcctcgaatatacataataaaatgtttaaatgaacaaaaaaatgcatatatatctgttcccatccagatcatgtctatgactggttaattttccaccaagttgccttttcctcctgggcacatagctagagtacatctctcaggctcctacctggggtcatgagaccagttcttgccaatgggctgtgagtggaagtgacatggcctccacactgcggcaattaagactgggggtgtctccacattcccaccccattctctcacttgtgggatagacatagaagacccgggataggaatctgaggctataagaaatgatagagccatttgatgggggagcttgggtcccagaataaacccagagtaaaattgagaactctggccccactgacccatactgggttgccacatggagaagaagcctttaccttacgcagccattgaaactgtcggattatttggtaaaagttggcttttcctaactaatacatagattgaatgaatattggtaggtggagcccagaaatctgaatttcttagaacaccttcaggtaattctgaaaaactgaagtttcctgaaaaggataatggctgggacacaggccagaagtgtgtttgtgtggcccaaatagttgtgtgaaagataacaattcacagtgactcttttccgtcgtgcgttatcctcatgcccgctccttcctcattcctgtttgtggcacaaaacatcagaaactaagcacaccctttatagcctgttgtgctagcacttgctttctcgcagatggaaaagttgatttctagaacatgagctcaatctcagagcacttgataagctgattgaaacgtaagtcacaaagcctggatgcacaccaagtattttatctattgaaacagcaaagctcaaagaggattcatctttatcttcatatttatcatcttttctgtccattcagagtcaaaaaccaagccttgaggcagtgtgggggttggggttaagcgaaagaaaatggcagcatatctattttagggaatgggaaagtacgagtgggtttggaagtttctctcaactaccaatacttgaaagcaggtacctgccaaccccaaaatacgggtcttcaagtgactcttgtttctctccttactgtgagactccagtggcacaatagcatagcagctcccttcacccccaacacgcgcgcacgcgcgcacacacacacacacacacacacacacattcacagttaaagcattccctttcggtggctcttgagtggcacagttatgatttagttggaaactggttattgttgagaaactgttagtcttccccttcaccttcctggtgcctttaagggggcccacctctgtccatgattcactatttctctaagttatgggtgaattgtcactacagggagtcaccctttctccagaactgtctgaagctttagtgagctcgggcagaggatggaaaaggaatggtccctgtccagctctgatatcacagcatcaagtaatcaggacagggaaaaactggcctcctgcacattctgaagtcaaaggagacaacatccaaagtcctatgtcagttgaagaagggtaattcccattcccaactcatacaccccatcccaattctctgcttatttctggcaagtagtgggtatggtggtaacctgaagtcttcctggctccaaaggaaagaaccaaaccccaaggtaaacccgtcttacttagcatagacagtatcaagattctaaaaactcaaaactgaagttttcttcctttggaaaatcaaaatactgtatacaaactctcatggcagcaagcatagaattgaagtataacaggctctttggggttcatagaccctgaaccccttgatggcagagactttaccttactcatcaccatgataccaagagcataacaggtacccagtgaaataattgccaaagaaatgagtgcatgcaggaatgaatacatgtgaagtgctcagttttccacagttaatgagacccaactcaatcataaagagctccatgatgtgaggagatacagtaattaagcacatggacataaaaggcccaaacctccaacttttcactcaatgtatgaatcatcagtgtaaagaagtcatgtcctgcagatgcttgatgatttggtttgaagttaaatttactcctgtgacttcattattttaagtagcctcaggcatctggaactaagtaaacgaagccagacacagtagctcagaagacatggaaaaagtgtataaacaggtatgtgcagtaaattaaaggctgccatggccttgaaacttacattataaaatcagaagaaaaaaaccccaaacatctaagattctaattgaagccacatttctgctgctaggtgatgataattaaagcatgagacagggagtcttaaactcacttgcccagtctctgtttctaatgatacagtttaattccattcatggctcaagtctcaacctccagtggtgaatacattggaacaactgttcttgatgtttctgtggttttgcggtacctgttattaaattggagttgatgattgggatgtatagaatgctctacttcagggatcagtttgtagaatgtttcagaagcaagtgtggttgagtggagagatctatggactttgtagtctcatatcaaagctcgaatctgttccctgttagccttattgccttgagcaagttatttaatctcactgagtctcaggttccttgttagtaaaatgagaatagtggtacatgcttagtatgggcattataaggattacatgaaatattcaatataaaatgcaccacccctagtatgacacataggtcagtgaattttggttcactcccttctcttcttttcatcccaaactctccaaatatcacttgtctttcttctctttatacaatatccaatgtttcatctcccttccagggtccaatgcagtgttgaatatctggtagaaattaactaaatgaacattgagatgaaatgcttccagtcaaatacctttctttggttaactctctccttttgaagttctgactttgatcttctgtagttcagttcatttcaaaccattttcagaagccctgttgtgcagtggatactcaggaaagcattgagaagagctatgcctaggtcctggttcctgtcatggttgctgatagtctggtggaggagatgcctaagcagatcttttcagtgttttcttttcttttcttttcttttctcttcttttcttttcttttctttttctttttcttttcttttttttcttttttttttttttctttttttttttaaggtagagtctcactctgtttccaagctggagtgcagtggcatgatcttggctcacagcaaacttgacctcctgggttcaagtgattcttgtccctcagcctcataagtagcttggattacaggcatgcaccaccacacccagttaatttttgtatttttagtagaggcggggtttcaccatgttggccaggctggtctcaaactcctggcctcaagagatctacccagctcagcctcccaaatcccctgttgggattataggcgtgagccacagtgcccagcaacttttcagtgttttctatgtgtggtctttcttcctcctgaagtgggcatgtttccccagcaggcaccttctacttctctgtattgatcactgcaaataaacaagaactttccccttcagaacacacacagaactcagcacttcctcctgccactattcacattgtaacccaaaaataaaatctaaagtcccacccccaccctcaaccacctgaatgaactccctcctcttggccagggcactctaaagttaacctgaaagactggttcaggccatgatgggaaggggggttggacatgccccattatgcccttctctctttcagaattcaggaaaagccaaccagcatttaaccgcaggaactttacgtctgataagaaacatttactatggattctctctgaagcctgctatctggaagtttcatctgcatgataaaactcggtccccacaatctcttattctaacccaggcattcctttctattgataataactctttcaacaaattgacaatcagaaaaattttaaatctacctataacctggaatccctgttgccccctcttcaagttgtcccccctttctggactgaaccaatgtgtatcttaaatgcatttgattgatgtctcatgtctccctaaaatgtataaatccaatctgcctcccaaccaccttgagcacatgttctcagggtcttctaagggctgtgtcacaggccatggtcacttatatttggttcagaataaatctctccaaatattttacagagtttgattcttctcattgacaacttcctgtcccagatgatatgtatcagtgaatttgtcttattctttctctcattatcccttcccaccttccccctcctgaagcagcctttgcaaaattatgactgagacagggaaagccatttaaattaaccgactccatcttgcttctaacctccaagttgtccttgttcattcctgaacagaggctgaactaactttgggagaaacttggtttacagtttacagtttaaaactaagatgatagccctttcccaaagcagacctctttcttgcttggggactagattgcctttgtaggactaacattagccacaagattagaaattatggtttaggagtcatgcaactggaggctataagattctggccctccctaaaatgctcctaagatcagtgcttgagatattttgcagactctgcacttcacggatcagctggcacccccagattgacaaactggctcatctgatcttgtggctgccacccaagaactgactcagtgcaagaagacagcttggactctctgtgatttcatctctgaccaatcagcactctgggctcaccggcttccccccgtccaccaagttttgcttaaaaactctgctcccaaaatatttgggaagactgatttgagtaataatgaaactctagtctctcgcacagcaggctctgagtgaattactctttctctattgcaattcctctgtcttgagaaattggctctgtctaggcagagggcaaggtaaacccattgggtggttatactccctcaacacactcatgaaggtgataacctaccataaggcagacacaccaggtctgctcctcaatagttgtgcaaacttgaacaataacaatgaaaacattttcttatcaatcttcagtttcatggtctgcaggacagatttttttttttttgcaggtattgggaaggctaaaaagaaaaataaattgtggtgatttctttattttttaaatttacctttacatctcttaaccaagtatcaagcaccaggaggctgagtcctaattcactctccctcactctgttacttgggaaactgacctggaaatgaaaccacctttgcaaaaattataacagtgagaaaattatggcaatgaatgagatcttatttaactgacccccatcttgccccaccttgcctttagctgcccttaattattcctggccttaggccaagctaactttaggtgacatttagttcccctccaaaaatttagttcccctctcctcctcaaaaatgcttcttgatctaatatacaacttcagcagtttcaggatacaaaatcaatgtacaaaaatcagtagcattcctatacaccaatgatatccaagctgagagccagatcaagaatacaattccattcacaatagccagaaaaagactaaaatacctaggagaatacagctaaccaaggaggtgaaagtcctctacaacaaggattacaaaacactgctcaaagaaatcagagatgacaaaaacaaatgtaaaaatattccatagtcatggacaggaagaatcaacattctcaaaatggccatacagctcaaagcaatttacagattcagtgctattcctttcaaactgccaatgacatttttcatagaattaggaaaaaactattaaaaagttcatatggggtggggccaggcatggtggctcatgcctgtaatcccagcactttgggaggctgaggagggtagatcacctgaagtcaggattcgagaccagcctggccaacatgatggaacctcatcactactaaaaatacaggcatgatggcatgtgcctgtaattccagctactcaggaggctgaggtgggagaactgcttgaacctgagaggttgtggttgcagtgagctgagattacaccattgcactcgagcctgggtttcagagtgagattccatctcaaaaaaaaaaaaaaaaagtcttatggaaccaaaaaagagctcaattagccaaggcaatcctaagtgaaagaacaaagctggaggcatcacattacctaacttcaaactatactacaaagctatagtaacaaaaacagcatggcaacagtacaaaagcaggtgcatagattgatggaacagaatagagagcccagaaataatattgtgtacctacaaccacctgatctttgagaaaattcacagaagctagcaatggcaaaaggacttcttattcaataaatcatgctcagataactggctagccatacacagaaggttgaaactggacaccttctttacaccatatacaaaaattaactcaagatggattagagatttaaatctaaaaccaaaaactataaaaactctggaaggcaacctaagaaatatcaatctggacataggaactggaaaagacttcatgaaaaagacactaaaagcaacagcaacagcaacaacaacaaaaaattgaccaatgggacctaattaaactaaagaacttctgaacagtgaaactacaggttaagcaggcaacctacagaatgggagaacatatttgcaaactgcatctgacaaatgtctaatatccagaaactacaagaaacttaaacaagcaaagaataaacaaccccattacaaagcaggcaaggacatgaacaggaacttttcaaaagaagacattcatgtagccaatgagcatatgaaaaaaatgcccaacatcactgatcacgagagaaatataaatcaaaaccacaatgagatactatctcacatcagtcagaatgaatattatcaaaaagtcaaaaaaaaaataacagattctggcgaggttgtggagaaaagggaatgcttatgcactgctggtgggaatgtaaattacttcagcaattgtggaaatcagtttggcaatttctcaaagaatttaaaacagaattaccatttgacacagcaatcccatcattgagtatatgcccaaaggaagataaatccttctaccataaagacacatgcatgtgtatgttcatcacagcactattcacaatagcaaagacatagaatcaacctaaatgcccatcaatggtagactgtggtctactattgtggcacatgtagtaccattgtggtacaaatgtggtacatgtataccatggaagactatgcggccataaaaagaatgagatcatgccctttgcagcaacattgttggccattatccttggcaaactaacgcagggacagaaaaccagatactgcacattctcacttacaagtagaagctaaacatggcgtacatatggacacaaacaagggagcaactgacgaggtgcagtggctcatgcctgtaatcccagcactttgggaggctgaggcagcaggattacttgagctcaggagttcaagacccacctgggcaacacactgagaccctgtatctacaaaaaaaaaaaaaaaaaaaaaaaaaaattaaattacctgggcatggtggcacatgcctgtagtcccagctccttgggaggctgaagtgaaaggatctcttgagcttagcagtcaagactgcagtgaaccatgattgtgtcactgcactccagcctgggtgacagagagaaaccttgtctcaaaaaaaaaaaaaaagaaagaaagaaaagaaaagaagggaacaacagacaacagacactggggcctatttgaaggtggagagtgagaggagggtgaggattgaaaactacttattgagtactatgcttattatctgggtgaggaaataatttgtacaccaaacccctgaaacatgcaatctacctacatagcaaacctgcacatgtatccctgagcctaaaataaaaattttttaaaaagaaaaagcaagaaaaataaattgtggtcatttacttctttttttaaatttaccattacctctcctagctaagtaccaagccccaggagattgagtcctaattcactctccttcactctgttaacgtgggaaactgacctgaaatgaaaccacctttgcaaaaattgtaacagtgggaaaatcacggcagcgaaagagatctgattcaatcaatcctcattttgcttatagctgcccttaattattcctgggcttacgttgagctaaatttgggagacatttaatttatagtttaagtgataataggccttccccacatctcagctactttgtaaagttaatgagagaccaccaggctaggaggatagaggagtctgaattctgctaaagtgtagacataaatgattgccagccattattgcagaagtcacaggatatgcaactgccccagtaactcctgcagataacatcaccattgtagaacctaagattggccttttgagatgtcttttcagattttttggatggccaatggctccacctagacccaccaattgctcctgtaattttatctgtgactcaagcaattagtactccccatacgctagccccctgcccaccagactatctttgaaaagacccttgctggtcgcgatggctcacacctgcaatcccagaactttgggaggtcaaggtgggccaatcgtgtgagctcaggagttcaagaccagcctggggagcatggcaaaaccctgtctctacaaaaaatacaaaaattagcctggcatagtgttgcatgcctgtagtctcagctacttgggaggctgaggtgggagaaccatctgagcctgcagaggttgaggaggcagtgagttgtgattgcgccactgctctccagagtgggtgacagaatgagaccctgtaaaaaaaaaataatgaaagaaagaaagaaagaaagaaagaaagaaagaaagaaagaaagaaagaaagaaagaaagaagaaagaaagaaggaaggaaggaaaggaaagaaagaaagaaagagagagagaaagaaagaaagaaagaaagagagagaggaaggaaggaaggaaggaagaaaggaaggaaggaagagcagaaaagaaggaaaactcctagcctccaagccttcaaggagattgatttgagtaataactctgtctccagcgtggtgtggtcggcctcgcatcaattaaacaccttctttgctgcaatgttctggtttctgtgcattgactgtgtctgtgcagcatgcaggaagaaccagtccagtggttaaagacccctgagtgagattggtgctgacagtctctctgaacactacccccgaactgtatctttctccctcttctgaaacagagtccttccagtgatccaacccagggtctgttctggctggagaagtgccctcccctctggacttgtccagggacttctggctcccaagagatggatgtgaatttgttcctatgtcccaggcccctagcttcctactccctccctctgcttcccagtcagattcagccacctcatactcagtaacagttttgagcagagtgtcacccaggatacccagacccaccactgtggcaagtcctagcaggtgcaggtataatgtcccctttgcaacttactaaacatgtgactttccttccccataccgccacactcccgctctctgtcttgcgcgcacacgcgcgcgcacacacacacacacacacacacacacacactgagagtctgcttcctcctctatgaagtaaggtagctggtgttaacattcttgtggccctatcattagtaaaagacctttctctgtttctgtaatcaaatacctctgggatccagctcctgcatgttgggcactgggtgctgccactggaaggagataaaacacagggagggtggccccctgggagggttataggggccactgcagtccgtctctgtcttctcaggtcatttctcagaaacatgcccttggctaggtctttgtagggggcgataaagccaagccgaggatataaagtgtggaaacagcagtgccagacatatctgcatactcatttctcccacagacacacacccatggagccagatgactgatggagactgatgacaacaataacaattaacatttgtggattaccctgggggccagtctaagggcttaacaagtatttatttaacttactgatcctcacaacaatgctaggagatagggactatgactattctcattttacaaatgttgaaacagaggaactacaaggctaagtaaattgaccagagtatataatatcataagtgacagagctggggctcagaccctggaaatcaggttctagaggttgctcattgaaacttttaaccagacagagagcttcagacacatgcaggcactcacacacagcaggactggcttcttcccggcattaggatgggaagaaggggcccatccagcctccctcaccatacctggccatggttggccccagcacccagcactctacccacaagggtatctataggggaggggcttgtctcagcagaggtacacagatattcacaccctagagcgcctaccattcccacccttagtccctgggaagtagaaaccaggacaaattctctcacacaagtcctttgaaaaaggcctactcacgcctgtggagacatctgaccacagggccaagtcttatcccagacaacctctacattctccaaagcagccatctctttgaccttgaaaaatcaggcagtaatgtactcttttcagggtaacactgaggcttagatgagatgctgtatttaaagcacgtaacacagggctgtgcacacagtaggagcccaataaatgaggcactagtatgatgccactgctataattaactgaaagcacagctgaatgcagagatagacacccagacagggtgttcctgcagcctctctgcatcaagactggctaggggaagatgttctggaaagcaggcctggaagggttttgctcagctaaagctgacctgggaatcagacaagaggaacagaggcagggggaaggaaggaagatattagtccagggcaggggctgaagtgtcccgagggcccttctcttcactaattcctgatgaaactggagctggaaattcaccgccaaactctgaggactctgggaatgcccctcccacctgctcccttttccacattttcacatggccagattccctgtatgctctgagccttcaagataaagtcagtaatttcctcccaggccctgaaaatgggaaagtcccagctatgttgattgtccctacaaggcaagacaaagcctgtttacaggcctgacctctgagccctgaaagcaggtcacactgtggcctctttccaacccagctctggagctatccagcagccataggaaggcctgccagctacatccttcatcctcccagccaggcctgcagtcatttgggaagtcccagggattctccccacccagagagataaacgaattcttcccgggtactccagtggagcttggcacttgctagaataagagggaggtcaaactgccctcagtgtgagggcatcacttctgcagcctttgtttctgtacccctaaaagagcagaaatgagtgacttcacagagctgtggactcagatttcacagatcgagtgcagagcaggaagtcaggggtacagggactaactgcgagctcataccttgttggaggaagcagcctcaccatccccacaatccatatattcttcagagggatggccaggccatgtgggcaaccaggctggtctacacccccaacttggagtgggaaggtccaggaccgccccccaggcttgacatctctccagctctccagctgtgcagtcttcatcaaggcttagcctctctgggccttcatttgcttgcctgctgactagtaatgactgaaccctgagttgtgaagcagctaaggcctgcgacacccctgcctctgtgcctggcaggtgggtccccatcagtgtgtgccattctccctcataccctaaccctgggtcttactctgcttgctgcaccaactgccctttcatcaactcctctgcccaccagcagcacattcatgtggtttttctgagaagattcccttctgttttgtgaaatagccagcaaataggggctgtcctgtcccagtaaaaggaattactccagccccagggcctttccccacgttaacgtgaagatctctatacagccacacagagggcctccaaagaggcttctcttactcaacgttcttctaggggacagcagtcaagccccacattccccatcccccaagttctgccaagagccacagctgggcaggacaagaccgagccacatttctcttgggacttcctcattactgcttatcacaaccttggcacgccaagcacaccatgccatcaacccactataccccaactctgccatggttgctcagcctggcaaggcccaagtcttctgcactactccagctgccctcagcagaatgtgtgtgtcttcagaaggtctttttgccagggcatcagctccattaatccccatggtgtgctaataggggacaatcactctgctaaataccccatgtcaataaatatataaggcaggatactctaatccattgttatcccagaccagaacattaggcagcaatgaatcactagcagagaaggcattcacgtttcaattatcttttaatctttctgattccatcaagaagaaaaccttagtgcttatactcgccaatctgtctctctgtctgtctgtctctctctcttcagtgagagagtaagcttataagctcagtactcagtacaccaggcaggcagctgcatcaagtttgagtcaaaaaacaagtttgttttgattgtatctatggcaggcaatactgcttccaaatttgtaacagttatacatttctttttaaaatgaatttatttaagaaaaaaatgagtcattttacataaaaccactaagtatataagtgaacagtgttgcaaagacttgtcaaaaatctcaaaggtagaataccaaaattgagaatatgctttagctgaaaggcatgccacagtagtgagaattccaggccctgggactggctggtagacaaggtgtttgggacacagagttccttaatttcctttcaaatcgcagttccaaggttgccatgtacccataggataagctccacctttcattcttctgtccattcattcattcaggaagtagttaagttttattttcggtgttttttgttaatactaaaaaattgctgaacagagagctctgtccagcaccaagtctggattctatggaagaagttggggaaacaggacacaaagttgtccagcaaagtctctgttggtgactgagtggctggctagggtccctgggcttacctgtcgggtaggacctgggctggctggatgtgggctgaggtcaatgtggtgctggtgctggtggccagctgcttctgtggcatgtatcatgtctgagaaagaatggtgcaccctgataggtccacacagtgtcagaaggcaaggtggccaggtcacaggctgtcacttattaaaactgtgtcatagaaagaccatacaaatggaagtcagattctaatttctattcagttttcacctggttgcatggccttgggcatgtcattttgtctccccagacctcagttttctcatctgcaaaaggttaggggtcttctattagctgagaggactattaggagaattaaaagtgagcttcgtctaggcagaaatcatgtctgttcacgtagaagttatgtatatccagtatctgccccatggtaggttccttttttttgttgttggagttttgctcttgttgcccaggttggagtgcaatggtgcaatcttggctcactgcaacctcagcctgctgggttcaagcaattctcctgcctcagcctcccgagtagctgggattaaggcacgtgccaccacacccggctaatttttgtattttcagtagagatgggggtttcaccatattggccgggctggtctcgaactcctgacctcaggtgatcggcccatctcagcctcccaaagtgctgggattacaggtgtgagccactgtgcctggccagatgctaattattttaataaattaatatatataagggtccagcagaaatctcctgcatatgtaagttcttgaacctggcaggtctgatgagaactgcccctccctctactcagcaccagaacttttctgtggtgaggatgaatcaaccacagggcaacaatgggggaaggtaattgaaaagctcagtggttctctgtggatcctgaggacttggaaggtggcagagggatggatcccagttcctaggtccagcaaggcacctgggtgtagggccagccctccgcttctctaagctttagcattgtcagtttgtctgagtggggaaaacagaaatattctcagctaaaactctgaccatggagcagcaagaaacactggctagcaaaagggaaaggtcaaatagcttattattttcctcttgaaatccgcccaaggcctggtataaagggaaaagccacaggaaagcgtgtggactttcccagtcacaattactaacagctgctcctgcattctgtagcatctgtgatattgtaagaggcccctttgttctctagaaaaccagacacattccttcctcctgagccccagccacccacgagagtgggtcaagttgggtgcattttgcaagctgctttggagcagataagataatttctttctttgaaatttctcctatgtccattcaacagagcattaataagcaccttcttgagccaggcattatctctgcagtagacatccaggagtccacggaaaaatcagagagacaagcaggacccagacaatcagtgaaatgtgagtgcaatagagtagaacccttgtgtggggtaaacgtcaatgttgcagaaatataaaagaagggtatattagtcagagttctccagagaaacagaactaatagattacacatagaaatacagaaagatgtggccaggtgccgtggctcatgcctgtaatctcagcactttgggaggtcgaggcgggcagattacctgaggtcaggagtttgagaccactctgtccaacacggtgaaaccctgtccctactaaaaatacaaaattagccaggtgtggtggcacaggcctgtaatcccagctacttgtgaggctgaggcacgggaatcccttgaacccaggaggcagagtttgcagtgagccaagattacaccactgcacgccagcctgggcgatagagtgagactctgtcaagaaaaaaaaacaaaaaaaaaaaagaaagaagaaagaaagaaagaaagaaggaaagaaagaaaaaagaaagaaagaaagaaagaaagaaagaaagaaagaaagaaagaaagaaagaaagaaagaaagagagaaagaaggaaggaaagaaagaaaaagaaaaagaaagaaaagaaagaaagaaagaaagaaagagaaagaaaagaaaagaaaagaaaaacagaaggatttattatgatgggttggctcatgtgatcatggaagttaaaaagtcccacaatttgccatctgcaagctggaggcccaagaaaactagtgatgtagtttcagtctaagcccaaaggtctgaacactagtgaagccaatggtgtaagtctcagtccaagtctgaaggtatgagaaccaggagcaccagtgttcaagggcagaggaagatgaatgtcccggttccagaaaagagagagtgaacttgccctttactctgtctttttgttcttttgagccctcaatggattagatgataccctcacacattggtgagagtgatcttctttactgtctgacaattcaaattgtcttctcttctgggaccatccacacagacattcccagaactactgtcttactagcaatctggacattccttagcccagtccaattgacatacacaatcattaacaaaagcatcttttccagccatggtttgcagggggaaggccttctgaccagggttttgtgggataagtagacattggtctggtaaagaagataaccgtgcaaagatccagaagtatgcctttggtgggtggaggggaataaaactctctgcaaccagtttggcctttctggaggcagggtccctcaggggagagaagagaggtgaggctggagagggaggcagtggccaagccacagccaagttctggacgggcatgctgagggcacaggggagccaacaaagggttctcagcagggaaatggcacaattggcttcacatttcagtcttttggtagcagggtggaggatagattagaggtgtgagattgtaggcaaagaaccaagccaggaaccttgtggtatccaggaaaacagttttaagaacgcaaagattaggagggcaacgagggactgtacttggagtgtagggtagatgaaagaatctaggagtcttgtcatttctattcagtctcctgaaccaaaattcaactcctgaagtcataaaccatgtttcatcaatcctggtatcccaagtatctagcataatgtcttgcacagaagagacccaattttgttaaaggatgggtggatgaatgaatgagtgaatgaatgaataatgaatctttctctaagacatcactaatgtctaatcaatgttggttattattattattattattattattattaccctagcttccctgtagggaaagtggaggccctgaagaagtcagagtcacagaaaactttactctgctcagactagaaattcccctcctttgctcagagagggccagctggagtcagcggggaggaagagctctgggcaggaaacagagtccttcctggctgctgtcctggccttggctttctgcctgtagggctttccgggccacagctggaactttcccgttgtgctggggacctagacatgggaggcaaggcagggtagtagaagataccctgaatttgtggtccagttcagccacttaattgcttatggcctgaacctcaatttcctcttctgaaaaatgaaatcgacttcataaaattgctgtaaggatctaaagaggcaaggctattgaagatgcttattacagatacatttaactagtatgagtttgtgtgtgacagcagtatagcaaaaatgccccagatttggagacttgattctattatcttccatctatgtggccctggtcaaagtgtttaacttctctgaaccttatttctcaattctcaaaagggaaaataaagtgcctgttacggcaggctgttgtaaagaccagaaatcagagattatagacaaataagcttgatcaactgtaaaatgcagcttatctctaaatcattataattgtagttataataatcataatagaaaaggcaacttgatgattgtttttctttggaagcagattatttggtcggcttagagagttttgtgagcagagacaggtgtcctgggagctttgagactggcatgtgaatggccatcagttaacacgttcatgcttcagtttcccttatcaatgcttcaggtggctgaaatcatgtcttttaagagctctgcacatcctgtgaccagcatgtgacccagaagtatgtgaccagacaatttctttaagggtaaagtgtataaaataagagtgactgccagagatttatccagcatctatgcttggggattttgcaaatcatttagcaaggacccctgatgctccaagcagcttgtggcagaggaaaggcttcttctcagaaaaggaattagacaccaagttccagcccaatccctggtcactaatttgttttgtgaccttgggcaagtcactgctttctctgtgttttaggatcatcaatttgcaaaacgaggtttggatgccaatgccatgcaatgttcatatcagccaaccctccccaagatggctgcaccctctgttggcagggtggtatcttaacttataggatgttagttaccctgagttctagtcagcttggagaaaaggccacaaacaaagggtgaggggtctggagtcatagtaacctctggattttcccgagagtctagctaaggacccagcatccagcaagataggagaccagtttgttttgcagaaaatggaaggagagggacaaaggcttttccagctttctttttcctagaagtcctagaaactaatatcaccctggaaaaaatctctgtcatccctcaaaatgggatatctgatgtaatcgaaactgccagcttggctgatgacaaattccaaggggatgaaaatgaaatgagagaaagacaaatggggaactagaaaaaaaaataactgtcagagaaaataagcagcggaagctgatgaccaaaaaggggaaccaaagtcttaatgtttggcctggagtagtgaagacagaagaattacattacaaaacacattcgagaaatggaaatgaggaggatgcggtttaggccaagatgtgagggcagaccctattgtgggccacaccaggattccagtctgggtgtctagacccaacttctcaccaagatgcctggcaaagcagtagttaagagtccaaaccatgctgggcacagacacagaagacctgtttcccagtccttgccctgtcatattctcgcactaccactttgggcaggtcatttgacctctctgtgtaatggcacgatagtctctgtcttgctgtcttacaaggttgtcgtgggtatgcagtgaagtgacactaaacactgtgccctgaacacaatgcctcatgttccattcaatgggagaattccaagaactgagatatttccttcctttgcagctgtctaggaagtgaaaaagtaacggaaattataaagaaattcagagatttttatttctcctctgcatatgagggcctgagacagccagccactcagccactgtcatacagtgtttcaggcaaagtgagtctgtgcccagtgtggttcaaacccagtcaaaccacagtagccattttcagattttaacctttttctttagctaatatctaactatccccaacctctcaacttattcattcagcaaaaatgtgcctgatatagagctcatgaccagcacagactaggcacttaattactgtttattaaattaatgaataaataggcaaatgaatgaataagtaaatgccaggccctgtcctaggtgctaagatagattcaaagaagaataggtagattctaccatatatttgacaaagaaaacatacccagaaaccttcaaaatacagggtgcaatcaaaggctgtcataaaggaatgcaaaggtttatgtgtccaaacgagtctggaaagacttcctggaaaaggcttggctgccttttccaggcaagagaaacaatgcctgcaagggcacgttctgggaaagatgagaaaattggttattactgcagcacagggtatttgaaagaagcgactgatgagacctgacctgaaaggtgctgtgggccaacatttaggaatgaacaggaagagaaaccagtgaagatagcatagatagagaagaggccaagtcaggccttccgatggccacactgaggagttgggttctagtgcatagacatggagagtggtaatttctgggtatgaagtcatttaagcagatcagacgggtggtttgggatagatatatttgctattaggactaaagttggtctgaagcgtagtgcttctcttggcaaaaaatgatgtgaaactgtttaaatagaactcagagtgaggcagagtctttggggatgaaaaaaaggaaatgaatgctgagatgcttcaagagtggaatgcacaggtctcagggaccaattagatgggaaaggagatggggaggaaatcaaaagatggatacctgctttcgaccttgactatctgggtgggtaggggtagcagatctgggagtggtgtaatgagaccaggaactgcagaggacttatttgccttcctggcactcagcatgatgcctggcaacgtagtgatgatggcatcaaaagatggtttggggagctttaagacccctctcctcaaaaattcatcttagattctgcccctccaaagccaccccaaatgaatacacaaagaagggaaataagtgtacctcctacacaaatgcaacctctacgccagtcctctattacttcttccaaccaaattgatttctcaaggccctcttaaatagggattttgtatctgccatagaggtttattacatcttggttgaaaaataataaaagaaaagaaagaagaaagacagggagaaaaaggagaactgcaaagagggaaggatgaactcattgaagttgagtgacatccaagtgtaaatgttcagtgggcatattgaaacacacatctagaactcatctaagaaccatttactgaattatgagagctgaaatatgtgagttataggaaaaagactctacactcaactacaataggggccaggcaaataagtgagtgaaatagaccaacaatatgaaaacagagaaattgtgggtgagggaaggggaatttctggtgacctgtgaacatatgatttacctagagggatggctgtccctctgctctcatggattgttgccatctaggaatgtgacttcaaattgccaaatctgattccatccaggcaaaccagaaattcagattttaaaatgagaaatctgcccatttgaagtattggcaattagttgtatttgttttaaaaactgtactggccaaacaggacatgcctgcaggctggaaccaggtagaggccaccagttggcaaactctcacgaagagtgagaatgaaagtatgaatcttggctggaagtggtggctcccacctgtaatcctagcactttgggaggctgaggcagctggatcatctgaggtcaggagttccagaccagcctggccaacatggtgaaaccctgcctctactaaaaatacaaacattagctgggtgtggcggcacgtgcctgtaatcccagctactcgggaggctgaggtaggagaatcacttgaacctgggaggcagaggttgcagtgagccaagactgtgccattacactccagcctgggcaacaagagcaagcctttatctcaaaacgaaaacaaaaacaaacagaaagtatgaatccttagagaagaccagcatttaggaataaacaggaagagaaaccagagaaagtagcatagaaagaagaggcagaaagtaatttgaggagaaagcagagcacagacatagaagggggagaaacagtggtaacttggcagtgttttcaagttggatctgagctacgaagaatccttcatattaggtaatgaggaaatcattcgtgaaaccataagaatttcagttgaatgataggagtggaggataaatggcaacaggttaaggagttaattggaggtggaaatggagagccccacaggtagagattgatcattcaaaaatgtttctcaagaaaggaaagagagagaagggaactggttgaaggaagatgaggtttaggaaaatcccctaagacttgagtgtgtcagttggaagaagggaagggaagagtggaaagaagatggaaatggcatgaagataaaggaaagttccagtttctggaagatacaggaggaaatcaaggatctagattgagccatgaccctcaacaggagcgacccgctcttctgagccaggaaggaagagctgtaatcacgtgaagatggagttaagttttgatatgagcacgggatgggcatggagagaattcttatctcacagcctctgccttcactggggaggaggctgtctcctgagaatgttgaagcctgagacaggagcccaagatgctaggggaagggtgaaggtgtggaatgccactgtggagtatggcagcgccaaagaactaggggcacattgcggaacagcagcagcactgaggagtctgtcgcatctgtggacctcttgtccttaaagatatccaggccttccagcaagcccaacagcctgggagtggtcaggaatcagggggaagatgatccgatgacctgggtttgggcactggcaggtgtggagatagaattgtagaaatgagagcatctgtatgctggtaggagagtggtcaacactgggctggactggggaggaaaggaagccaggtaggggctaagggacctggaggagctgatgcagtagattcagagttgctgaaggggaaggaaatagaaggctgtggtcaaaggactggattactaagtggaacattacaaaatggagaagttcagggagatgacgaagtccaaagggtggccatgcagcaaggctgatatgaagtggtgataagttcacttgaagagggacccagaggaaactagagaacttacattccctaaatatttccttcccttaaccttctgctccttaccaagccttccatttacagcatgggtgcaggtgaccttgaaaggggagccttagaatgaaaggaaaagaaaataagcaggagaagaaaaggcacggatttcaaggaaaaaaacacttggatggtagatcatacagaagattgggcttggagtgagaacacgtgaatttaaatcccaacccctccagtccccagctcccttgtccttgggcaagtcaacctcgaaggcttcatttctctgtctataaaacaaggaaatgacaccagtgtcacctacatagcaatggctttgtgggaatcccatgatttaatgaatcatagaggacacataaggggttgtggtttttggcatctcatgacccacaattttaaaatctttccttgttaactgcacaggtgttctagaagatattcagtaagtatttaaaattaatgtttattgtcatgaaatcagaattgcataatgacaaggctaatgccataattttggaatgtaaatacatcctaactgcattgggagcagaacatgggacaaatgtgggctaaggacatgctagagcagcgaactagccataataaataaatatttgtgtgtcacttgcatagtcctttttgtcacctcggggtacaaatagttcacatctctctcattatgttcatttaattcccaggcctccaggttgtccatattaggaggaagtctagtaattcatggttaagccccctcccaacatccttacagtgtccccagaaccttgaggacctattcagtcaagctgagaaagctttgctgctaagtttcaagcaaagtggaagctgggtaacctgaccctcttaccagtggccaggactcctgactgccattgcttctgtcactgtccccagggtacctatggatccctggcctcacaccacctaaagattttcctgttccttgctctcatggtacctcctccagccttggccacagtgtcatccttgggccccctaggtttcagcctcttgagtttgcacttgcaggtttggctgttgctctcaaagcaggactattgcatcaacatggcaggtgcagaggtcttcccgcctcaatcgtcacccactgatttctctgccatggccttgaactcaggcgaccaatccagttggaacctccccacactctccgtggctaataattttggactcagaagaaaaagcctcaatttctctcctctcaggaggtctcttggtccttgagcaaatgtatccatttcttctcctatctccagtctttgggcccccaaaggtttttttctccctttctccaggacaatgagtgcctatttacaagtgcctgtttctacttgaataaggtttctataaactaagaagtgttccttagggacacaagtaactggcactcctgttggaaaatgctaagatctaggtcacgcgcacttcccccaacagacacatacacacattcacacacacacacacacacacacacacacacacacatacagcttgtctgcactctagcactggcactgacgctaacgctataatcctgggcaactttatttccccatcttacattaagcagtggtgcagggattttcaactctgggatctctatcacacctcccagctctgattgcttcctaatttacatatttattgagcatctgatgctaggtcctcatgctggtgatgcaggagtaaactagacagacaaaagtccgtgccccacattgtctgacacctacacacctgctgttcggactccattacaaacagctccaaggggaacagtgcacttgtaaagtttctctcattaccatggccacatccgtgagcaataaataagttgcatagttgaattatttgataatgctttgtttttaactccctgcacttaagtcagagatgtgtgtgctttggaaaactatttttcctgactcattagacaaatactatttgcatttttattcagcttccttcctcagactctaatttacagtaaaggcaagaggatttttgaatggagccagtgctttgcaatgtggggctccaccagctagccgactgaaatcattaataaagaagcctttttaagtggctgaagtttcccctttttggcatgcaacattttgcaaccaagcggaagaaacatcatccgcaaagaagaatccatgtggcccctgaaaatcactctctctgctacaggctccccactccccagtgctccccttagccctgccactatctctcctccagatggaaaaagtgaggaactcagggaaccaaaagtcttgcttctttactaatttccctgtctgacattaaatcatcctacagttcagatatctgggggaagtgactagagattcttgaactgttaataattaatttaaatgatatttgttaagaacctacgacatggaagatactgtaccaggtgctggggtccagcatgggcaaaggcctcaaggtggaatggagctatggtgtgttctggaagcagagagtggggctgagggtgacatgaggtgaggagacaggagagggcctggcagggtgggaccttctggtgagagctggctgctgtgtgaggagctgaggccctggcttgattctggggttacttctttgaccttcagctttttgtcatgggcagacagaatggggatgaaaaaaagcttaggaaatggaaacctccctatgcattatataataaaaatggccaacacattttcatagcaagatatcacagcagaagcttgtactgggcatcaggactgtaggcatccaatgcccagaaactggcatgtgccctgggacatcccctgagaaggcatgccacgagccctcagactgacacagctctttacaagttgcttacagagcactcttggtttattaattcatacaagtctcatgacaatgtcagaagcagctgtcttactaatcccctttgacagaagaggcccagagaggtcaagggacttgctcaaggccacacagctagaaagaggcagagccaggcctttggccctggtgttctgacaccacctggggctccttctgttattccatgctacctcttctttctcttccgtattcccttctcgttcccttccttcttgtgtcttgcttcttatctgcctgtacttattcctgttggtgcctcccagctcagccagcatagctctgtcttcaaataccccatgcttcattctggggtcccatacacagtctgacaatcatctgagggggctgtgggaggacatagaaaaaatacagctttacatagaaaaaaatgcaaattgtagccaggcgcagtggctcatgcctgtaaccccagcactttgggaggccgaggcaggtggatcacctgaggtcaggagtctgagaccagcctggccaatgtagtaaaactccttctctactaaaaatataaaaattagccaggcgtgatgtcatgtgcctgtagtcccagctactcgggaggctgaggcaggagaacctcttgaatccaggaggcgcaggttgcagtgagcagagatagtgccactgcactccagcctgggtgacagagtgagactctgtctcaaaaaaataaaataaaataaaaaatgcagactgtgattcagcaggtctgggttgaagcccagaactctctgataaattcaatggcacttaactacttggaggtcatggatgcctttgctaatctaatagaagctactgaccctctctccagaaaaatgcacaaaaacataaatgtggaagacaactcctgatggatctgggagcctatccaagggccacagacaagagtcctggtctggacaaaatgagctgctcagtattttcccacctggccagcatttcctatccaaagacaaatgttaaagttgttctagcagagccatgcaccagcagcagtatcatcacctgggaaccggttagcaatgcagaaccgcaggcccaccccaaacctacagtcagaatctctactttagcaagatcctaaggagatgggtaagcacattacaatttgcaacctttgtaagtttgcccaaaatgtgacccctccttcacccaccgatcgccaaggttcaaaaatctgcccaacccttgagcccatcttaaatgtaccatcacgagccttccctgggcccctcagctgggactctcaccgctctgtatctttctggttaatgcaattattctgttcccttagatgaccccagcacaggtgctaaaggagtcaacaaaaggctattgtcaaaaaagtgtttctgtctccactccatctgatctctgtttccctaagacctgcccatccccctctcccagttcggcaccttgaccccctcatcacactgctcaggccaccttgtacaatgcaagccccaaatgaggaaagcattttctcccccaatgtgtaacacgaaagtgctgtagagtggctcacgctgcctttagcctaagaatttatttaactcttacccccaacccacatcagtctcctccctctagggctcaggtgctaatctgtgagggctggctcagaagacaatctaaagaacaagcctcttgcttcctcaggcatcactactcctcaccaccatcacccccacccaccaactcaggccactactctttctgttctcatatgctatgcccatcgccacccctattcccatgctcaggagtattcttggctactgcatgcaattagacctggggcagatccaatccagaaagcaagaaatcttagatgctggaagcttggggtaagtactgatcagatttattcctaaattcagtcctactttccatggattcttactttagcatctcttctgaaaaggaagcatcatgtctaattcacttctccctccctgtgcagtcctctacctggtgctctgcacagggtatgtgctaattgtatgaatgttataataaagagatagtgcagtagatgacaaagggcactacattgagagcccagaaataagcaaaccagcacaaatgtagccattcgtcttctatctcaccttgagcctgtcactaacctgttcatggcctcagtctccccatcagagaaacaggtagatggtctctaaggtctcgttcattttctgacattctgtgaaaaattaaggaaagattttcatccttgacaggaaagggattgcagagtagcggccctgggaaaatgggctctattctacctggagctagcctggaggagaggccttgagtgggggttgtctagaaaggacatggtgagtgcagagctacggtgcatctctcttgaaggctgagtgaagggagcaccagcaagggagcctgcactaggtggggagggacaagtgaaccgcagaagttggtgggagcccaggcagtggcttcagatctttccagagagctcacttttacttcctctttttttcacccctgacactgagtgggagtctgcagcgatgaccaaggttcatgcagaggatcttagtggtggggtcagaccccgggaggaatgaagaaagcattattcaccaagaggagcttttccattctttatctatgagttgatagagaggaggccccggggtaactgaggattctggacagcatcagagcattgaccctcattttccccatagcccctctgggggcctttcccttgtgtgtccccaagcgagagtccaacccaggtttgtgccagagcctaacccaggcttgtgccgagatgttcccagcacagccccatgtgagagctccctggctccgggcccagtatctggaatgcaggctccagccaaatgcattctcttctacgggatctgggaacttccaaagctgcctcctcagagtgggaatttccactcacttctctcacgccagcactgacctcccagcgggggagggcatcttttcttgacagagcagaagtgggaggcagacagctatcactttccagaagactttcttttctgattcatacccttcaccttccctgtgtttactgtctgatatatgcaaaggccaagtcactttccagagatgacaactccttcctgaagtagagacatgcttccaacactcagaagcctatgtgaacactcagccagcaaagctgggaagtttttctctgtgaccatgggctaattggtctccttctctggattgtggctttatcagataaaaacaagtggtcatgccacaggatgtctataagcccattgattctgggattctatgagtgatgctgatatgactaagccaggagagacttatttaaagatctcagcatctttcagcttgttaacctagagaaaacccgaagcatgactggattataaagggaaattgaatgcggtccaccaagttcatggtaaaggatgcactaactgattagagagaggtttcccctgatatgaggaaaacttcttggaagatgaggtgagatggcctaggaagaaattcctacacaaagttgcacagtctctagtcctggaaacattttattcattggataagaatggattgaggcatgagcagaggactgagacaaacacagagaagtttcaacactggttggggagaaaaggagtaactagtgagattcaggcagaacaagaataaggctcctcaagaggcacaagcaaagcagggctcgagttgatttgttctctcttcatcctgctttttgtaattccaccagagtctgaaatggccactccatagagtctctgctctgggattctccaggaaaccaatatccatcatgagacatcaagtctagtcccaggaagaagagattctggaatggaaacatcctgggtgggagtctcagcacatctactattctgtctgagttactggacaaataacttcagttttaacctaacgaaagctgggttggttggaggactgggcaggcagcgctggaaagtatgtcagcaccatacctgactccctgaatgcactcaacaatgccattactgaccacttactagaaataaaacagtcatttgttgaatacaacccgtttctttttacaagtgtagtgaaaagtgttttctttcaagaaaccccatgcatttatagacattgcctcagtgaccctttatgaaagaagtcactagtctttgtatgcccattgggcaagggcaccgcaaggctcagaaggaggaggcagtgggctaggagaatcgagagatcagaattttaaactcagcccagccattaacatgcctcaagtactcctatcatatttgtaagagacaacagttcactgaaatgaattctaaggtctttgggtttttatcagtgtgcttctgtagtttctgaggaaatctaaggcacaactgaggaatgaagtcaggctttccaattcccgaaatactcctccactgcttactcatgtcccttggaaattaagaaggaagccaggagaatagctgccataaccagggatgaacttcttgtccactgctgcctgctatgctagcaacagcctcctaactcataatgacttagccatgaggaatgtttctagattctcctttagctgtctgcccatttggaagatgctgaggacagagagaggacccaagcaggcaactagttggaggacttgtacacgtttccttccagcagtatgtcagagaggtggcagcccactggggacagggctgcctgggttctgtgctcgaggggaccttgagcaggctatttaacccttctgtgcctcagttgcctgatctataacatgaaaattagcaatccctactagataaagttggggaatttacagagttaatatttgtaaaggtctgagaatattcctggcagagtaagcactctgtgagtatgacactggcatttcttctgcagcactacatgctgtctatgcctttgtccaagtctgaaaccctagaactcttagaattcagttcaatgtttacacaatcctacagttctgctaggcttctatgatgctactattctgcatttgaatgagcaaatggatttaatgcattgtcagggagccggccaaagcttgagagctccttcctggctgggaggccccttggaatgtggcctgaaggtaagctggcagcgagcctgacatgctttcatctagtttcctcgcttccttccttttctgcagttttcgcttcagagaaagcagaatccttaaaaataaccctcttagttcacatctgtggtcagtctgggcttaatggcaccccatcctccccatttgctcatttggtctcagcagtgaatggaaaaagtgtctcgtcctgaccccctgcttccctttcctacttcctggaaatccacaggatgctgcatttgctcagcagatttaacagcccacttatcactcatggaagatccctcctcctgcttgactccgccctctctccctctgcccgctttcaataagaggcagagacagcagccagaggaaccgagaggctgagactaacccagaaacatccaattctcaaactgaagctcgcactctcgcctccagcatgaaagtctctgccgcccttctgtgcctgctgctcatagcagccaccttcattccccaagggctcgctcagccaggtaaggccccctcttcttctccttgaaccacattgtcttctctctgagttatcatggaccatccaagcagacgtggtacccacagtcttgctttaacgctacttttccaagataaggtgactcagaaaaggacaaggggtgagcccaaccacacagctgctgctcggcagagcctgaactagaattccagctgtgaaccccaaatccagctccttccaggattccagctctgggaacacactcagcgcagttactcccccagctgcttccagcagagtttggggatcagggtaatcaaagagagggtgggtgtgtaggctgtttccagacacgctggagacccagaatctggtctgtgcttcattcaccttagcttccagagacggtgactctgcagaggtaatgagtatcagggaaactcatgaccaggcatagcctattcagagtctaaaaggaggctcatagtggggctccccagctgatcttccctggtgctgatcatctggattattggtccgtcttaatgacacttgtaggcattatctagctttaacagctcctccttctctctgtccattatcaatgttatatacccattttacagcataggaaactgagtcattgggtcaaagatcacattctagctctgaggtataggcagaagcactgggatttaatgagctctttgtcttctcctgcctgccttttgctttttcctcatgactcttttctgctcttaagatcagaataatccagttcatcctaaaatgctttttctttgtggtttattttccagatgcaatcaatgccccagtcacctgctgttataacttcaccaataggaagatctcagtgcagaggctcgcgagctatagaagaatcaccagcagcaagtgtcccaaagaagctgtgatgtgagttcagcacaccaaccttccctggcctgaagttcttccttgtggagcaagggacaagcctcataaacctagagtcagagagtgcactatttaacttaatgtacaaaggttcccaatgggaaaactgaggcaccaagggaaaaagtgaaccccaacatcactctccacctgggtgcctattcagaacaccccaatttctttagcttgaagtcaggatggctccacctggacacctataggagcagtttgccctgggttccctccttccacctgcgttcctcctctagctcccatggcagccctttggtgcagaatgggctgcacttctagaccaaaactgcaaaggaacttcatctaactctgtcctccctccccacagcttcaagaccattgtggccaaggagatctgtgctgaccccaagcagaagtgggttcaggattccatggaccacctggacaagcaaacccaaactccgaagacttgaacactcactccacaacccaagaatctgcagctaacttattttcccctagctttccccagacaccctgttttattttattataatgaattttgtttgttgatgtgaaacattatgccttaagtaatgttaattcttatttaagttattgatgttttaagtttatctttcatggtactagtgttttttagatacagagacttggggaaattgcttttcctcttgaaccacagttctacccctgggatgttttgagggtctttgcaagaatcattaatacaaagaattttttttaacattccaatgcattgctaaaatattattgtggaaatgaatattttgtaactattacaccaaataaatatatttttgtacaaaacctgacttccagtgttttcttgaaggaaattacaaagctgagagtatgagcttggtggtgacaaaggaacatgatttcagagggtggggcttacattttgaaggaatgggaaagtggattggccccggtcttctccactgggtggtctcctctgagtctccgtagaagaatctttatggcaggccagttaggcattaaagcaccacccttccagtcttcaacataagcagcccagagtccaatgaccctggtcacccatttagcaagagcccaacccccattccttttctcacagaccctgacccctgcatgcaattcttcccttaacatattgcaactgccccctaactgggctacccaccccccaatctgtacctctccaattaataccccaacctggagtaatacagacactgccagtattaggaaataaggaaagagttaatcaccatagataagatgattagattgaagtttcatagagatgatgagacctgaacttattatttatgaatgaagaaggcttttctaggaaaattataggatcattaagaaaggagaaggaagagtgggagcaaatacctggaggtagaaatggtgatgatgtgtacatcaagcagggagaaaaccaatgaaccagatgcgaattcgggcccacaccaatgtcaagggatgacaattagaaaggaaggttgagtcaagggatttgaatgttagggtgaaaagttactactcaactctgtaggttaaaaggaaacgttgagaatcttcagtccaatgaggagggatgtgccatgtttagagattcagagataagtttcaggaaatgtaacttatagattttatacatacacagagaaatacggactagtgagaagctattgccatggtccaagcaagagatgatgaaggcctaaatatggagccaaagaggcagcaatgaagaatgagccatgcagggtgaaatgctgcatgttgtaaatggaggagaaagacctgtgacttcagatatgaaaacctcatcttcaacccacattttaagggggcagcttccctgaaaccagaatgtgtttccctccattactatacccccatcccaatctcaggcacctggaatcatccatttaaacagatgagccttctattcctaaatagccacctgaagtgtgtattcctttgcatgatatttgtcccacctaaagcattcgacctgcctgggcacccacaccacgccaacactcaggaaagcagatgtcttgctctgttgaataaactgcatggttcttaacttcccagtctggtggggaaatgaccactgtgtcaacctagagcaggcagtgcttttggcagcatgaggtgctggggacaactttgactggcaagaagcacactcaggttctcaccccgcatccagcgctgactcgctttgtcagtcaagacaggtcagatattctgagcctacatcgatcatacaggtatgataatgtgttacaaataggaacccagaggaaaggttccctttcggatctgggagcacatctgttggaaaacttccatttctactaactggagttgcagagggagagaagggattctgcttctacattcctgagccagtccagggtccctgaatcagactaccgaatcccttcaaagctccaagtaccctgatatatcagtcagcagacaatttattgacagctatttagaaaactcactgaccctcactccaggtcaagcagcgtcccctgcctctcctctacccctacattccctggccttgatcaccagtcaggagtgaaatctcaaattgcagtagatgccaagaggcaaaaagagaatagaatgcaaacaaatgagacctcatcatacggcttccgagcagcaaccttttgacgccaggcagatttgaggcagacagtctgggaggagaggaggcagagaaaggggggatccacatgctcaaaccccaaattaatctgcttacattccccttgcaggccacatctcttcattttcaggaagtcttgactccatactgttttccacccaagcatggaattcctttcatgatgaaactgaacacagggcattggcagtggtgagactctgttttagaagaaagtgccaagtgcaatgcattcatttcctgttgctgccaacaatcagttccaggaaatctaggctttttatgtcatgctcaaaattcttccagcctatgctcattattcaaatccaaagccacatccacatctgtaggtgttagttacagaagcaccatatttccaggtaccaaaatctgtattagtttcttattgttactgtaacaaattcccataagcttaatggcttaaaacaacaaaaatacattgtcttatagttctggaggtcagagttatcatgggtccatagggctatattcattccttccagaggttctatgggagaatccattttcttgcttttttccaactgctagaggctacctcaattccttaactcatggtctcttcctgtgtcttcaaaaacctctctctctctctctctcactccttttctttcatagtcacatcttgtctctgactctgactttcctgccttcatcttaaaaggtgattatattgtgattatgctgagcccatttggataatccaggataacatcttcatctcaagattcttaagttaatcacatttataaaatttcttttgctatgtcaggtagcatacttatagagcatagggattcgattaggatgtaggctttttttttttttttttttttttttggaaatggagtctcgctctattgcccaggctggagtgcagtagcacaatctcagctcactgcaacctctgtctcctgggttcaagtgattctcctgcctcagcctcccaagtaactgtgattacagatgtgcaccaccacacctggctaatttttgtatttttagtagagatggggttttaccatgttggccaggctggtctcgaactcctgacctcaggtgatccacccgcctcagactcccagagtacaggtgtgagacaccacgcctggctacaaggatgtgagcatctttgggaggggagcactactgggacaatcacagccaggagccaggtgaagatttacaataggtagttggacactaagacatggcctttgagatctgtatctggtttggtgactagattgtcaggtaaacttttgcaagtcaccttttatctatgggttcataggctgtggatttaatttgtgcattaaatgcttcctaagtgacctaaggtatattggagtcacctgaggtctttccaaaacatcacaacatcctcaaagattctgatttagaatgttacaatgcagggaaggctcctcttcccattgctgtattttacgagttccctagaagatggatactggtgcacagatgagtttgatgccatgtgctcctcagttctctcatattcaggtcattggagccaacagccagtcctggtaacctctgacttgggttttcatagtgtcctttgttctgacctagccttgaccaatttacaatcaggaacaaaagggagcatagagtcgagacatttaggacattgtaaagtttgaaatacaactgttcaccatcccaggcagtggaatggaatttttaaaaatgatttgaacaacaaaatatccataaaacctttcagtttgacagagtggcttcaggaagagagtgggttaacaatgtggcattcccattctagcccggcagcctgatcctaaaagacagttatgggtcgggtgtggaggaagcacagaaatatgtcaagcactgcgagtagaaagagattttacatgtctttactggcagattggaaaagtgctagtaattttttgagaaaattatgttgccaggaaaatcagaagccaagactgaaaaagcctttgactattctatctataaaacaacttccgaatcttccatgagctagaaacaagccatgacagccactgaattaggagggcatgtccactgagttccatgtacagtatggccaaggagaagaaatggacaagcaagggcctcacagaaggtggatctggggccccggacaaggaagcccttcctgcaagtgagctcagagcccctgttcctgttccaggaagagtcccttttgatgtctgcccagcagtatatcagaattgctacaagtcagtcattgctgtgtgtcccccagtcttccttgtccaatgagaatgtttactttaagcatcttgttcctattccaccttgtaaatgagtgtttaaattgagcagataaattgttcattttttaaaagtactgtcaatctttcatttggaggctataaaattcatttccataaggtatcattatctcttttttaaagttttcaattttgaaaaattttggttaaaaaatgcataccatgaaatgtatcatatttaccatttttaagtgtatacttcagtattgttaatgttcatatacttaacattgttgtgcaatagatttccatcttgtaaatccatcttgtaaaactgaaactgcatactcattaaacaatacctgctcatttcctccgctgcccagccccggcaaccaccattctactttcctcttctatgaatttgactactttaggtaccttctgtaagtgggattatacaatatgtgtcttttggtgaatggttattttatttagcataatgttctcaaggttcatttatgttaaggcatgtgtcaaaattcccttcttttttaaggttgaataatattccattgtatgtatataccacattttgtttatctgttcattcagtgatggacagctgggttgttttcatctcgtggttattgtgcaggatgctgttctgaatgtggatatgcaaatgtctcttccagattctgctttcagttcctttggatatatacccacaagtgggattgctgcatcatttggtaatcatatttttatttttttaagatctaccatattgtttccatagtagctgcaccattttacattcccaccaacagtaaacaaagattccagttttatcgcatccttgtcttcgcttgttattttctgtctttttgatactagccatcctaatggaggtgaggtgatacctccctatggtcttgatttgcaactttctagtattagtgatattgagcatcttttcagatgcatgttggtcgtttgtatatcatctttggaaaatgtatattgaaatcctttgcctatttttaattgggttatttgttttgtattgtcgatgctgtagaagttcttttttttcttttgagacagagtttcactttgttgcccaggatggagtgcagtggtgtgatctcagttcactgcaacctccacctgctgggttcaagcgattctcgtacctcagccttctgtgtagctgggattacaggcacacaccatcacacccagctaatcttttgtatttttagtagagacttggtttcactactttggccaggcaggtctctaactcctagcctcaagtgatctgcctgcctcagcctcccaaagtgttgagattacaggcgtaagccactgtgcccaacctgaaattctttatatattctaatgttaaccccttatcagttacatgatttgtaagtattttctctcatttcatagactgacttttcattctgctgattgtgcccttcaatacaccaaagtgtttaagtttgatgtaattccatttatctatttttgctttggttccctgtgcttttggtgttatatcaacaaaaaaaaaaaaaaaaaaaaaaaaaaacagccaagcgcagtggcttacgcttataatcccagcactatgggagtctgaggcgggcagatcacttgaggtcaggagttcaagaccagcctggccaacatggtgaagccccatttctactaaaaatacaaaattagccagacatggtggtgaatacctgtaatcccagctacttgggaggctgagggaggagagtcatttgaacctgggaaacagaggttgcagtgagctgagatcgtgtcattgcactccagcctgggcaaaaagagtgaaattccatttcaaaaaaaaaaaattgtcaaatccaatatcataaagatttccccctactttcttctgggggtttataattttacatcttgcatttaggtctttgatccatttcgagttgaattttgtatatggtataatataagggtccagctttttttttttttgagacggagtttcactcttgttgcccaggctggagtgcaatggcgtgatcttggctcactgcaacctccgtctcccgggttcgagcgattctcctgcctcagcctcccgagtagctgggattacaggcacgcgccaccacccgggctaattctgtatttttagtagagacgggatttctccatgttggtcatgctggttttgaactcccgacctcaggtgatccacccgcctcggcctcccaaagtgctgggattacaggcgtgaaccagtgctcccagcaagggtccagctttaatcttttcatttggatatctagttttcccaacatcaactgtttaagagactgacatttccttactgagtggtcttgacatccttgtcaaagatcatttgaccatatacaagagattttatttctgggctctctattctattctactggtctatatgtctgtctttatgccaataacacattattttgattattgtagaattgtaatatgttttgaaattgataagagtgagaccttcaagtttgtttttctttttcaaaattgtttttgactatttggaattatttgatattccatgtgaattttaagatgggtttttctattttggcaaagataccattgggattctgataggattgcactgaatctgtagattacttgagtagcattgttaagctgtcaatctcaacaatattaattcttccaattcatacacctgggatgtcttctcatttatttgtatcttctttaattttgggcaatattttgtagtttttgttgttcaagtttttacttctagatattggcttatccctaatattttattcttttcaatgctattgtaaatggaattgttttattaattttcttttcaaagtgtttattgttcatgtatataaaatgtctgatttttgtgtgttgatttgttgtgttgtatttgtactctgccgaattcctttattaggtgtaacagttcttttgcatgtgtgaaattttcagggttttctacatataaagtcatatcatctggaaacagataattttacttcttcctttccaatttagatgactttttttcttgttttgttcagatgggtctcattccagtactatatttaactgaaatgacagaagcaagaaagtgctttcagtctttttctattgtgtatgtttttaactgtgggcttttcatacatggactttattatgttgaggtagtttctatttccacactattttcctagtgtgttgagtattcttatcatgaaaagatgtcgaattttgtcaaatgcttttttgtcatgaattgagattataatgtaatttttgttcttcattctgttaatgtggcatattacattgattggtttttgaatgttgaattatccttccattccagaaataaatcctacttagtgatggtatataatccttttaatgtgcttttgaattcggtttgctagtgttttgttgaggatttttgcattaatattcatcaggtatatttgctggtagttttcctttcttgcagtgcctttgttcaactttggtatcagggtaatcctggtcttacatagtaagtttggaagtgtttccttctcttcaatatcttagaagagcttgaggagtattggtattaaatcttccttaaatatgtggtagaattctctagagaagccatctgattttgaacttttcttgcttgggaggtttttgattactgataaaagctttttactagttataggtcagttgatattttctatttcttaataactgtgtttctaggaatttatccatttattatggttattcaatcagttggcatacaattattcataatattctctaataatcctttttatttctggggcatcaattgtaatgttccctctttcatttctgattttagttgagtcttctctcttttcttcttacttaatctagctaagggtttgtcatttttgttgatcttttcaaaacaacaattttttgtgttgttgattttttcttttgtttcatttatcactgatccattctttattattttcttctttctggtagctttgggtttagtttgttctttttctaggttcctcaagatataaagttagattgttcatttcagatctttcttcttttttaatgtaagcacttacaactgtaaacttccctcttagcattgctttctctgcaccacacaagttttgttatattgtgtttttaactttttattctgaacaaactttaggcttacagaaaagttgcaaaaatagtacagagggtttccttatattccttgctcagcttcccctgatactaacctcgtactttcttcatgtctggtaaactttgctgtgtctctgctccatatatcttctgcagtatggcctctgagtcaaaggggcaccctcatctgcgtcaagtcatcctcatagttaagggagggtggaggaattcatgagaatattaacttctgctcagagatgacatatgtgacttctgcttgcacccaacagggcaaagctaaattactggttgcacacagagaatgtcctcactgggctgaacgaccaaaatcccactaaggcccagaataattctcatctcaagttcttgcaggacttctaggacttcacctgtcccttctttctaagacactcatctccttttcttatatccaatgcagtatttcctgaaagtcaatccccctttcaatatctctgttttgaaaaaacaagacagatttaggaacaacttgctcaggaagctatcagtatcagtttgagttcctccttagtatctcttcatccactacccatccttatttcctaatactaataataatgagagctagttcttactgagcactaactgcattctgattattttcatttcacttttaatttttaactcattcttcacaacaaccaagaaaagaagttacttttattatctctattgttacagatgtggaaactgaataacagatagaataagtagcttgaccatggttatgcaggaaaaccaggcaatgatgcaggcaaccatttcttaatcacgtcgttcaactgcctctcctggcactaagcagcaaatacttttctctgcctcctatttcccaagacattttggtccttgttcagataacatagaacaatgtggctcaaaggaaacctcagcctatcaaattcacacctggtaaatgtagggtatggatgggaccattacctgaatctgtgctcatggcaaacattgcatgccagtcacagcaccatgaactcaaactcaaagcaaggtctcacagtgctctccaggacatctctctgggctgccctcactagtcaaaagagttgatacctgaatggcaccctataaagtctattgtctatggtgcacataacaaaacagaatggtggttacctcttggcccctggtgaccaccgttctattttctgcttctatgagtctgttttacgtacctcatataagtggaatcattcagtatttgtccctttgaaactaattccacttagcataatgtcctcaaggttcatccatgttgtcacaagtggaaggattccttcttttttaaggctgaataatatcccattgtgtgtatataccatatattctttatccattcatctattgatggacacttatgttgtttttataacttgactattttgaataatgtaattacaaacatgggaatgtagtggcatgccatattaaaaatactgaaagaaaaaaatcaatcaacaattctagataaggcaaagctacccttttcaaaagtgaataagaaatgaagacattccagccttccaaaaaatactaaagagagttcttcaggctgaagcaaaagatcactaaatgataattcaaataaataaagagcattggtaaaagtaactacataagtaaatataaaagacagtataaatacttttgtttatttgtttaaaattatttgtttcttgtatctgatttaaaaggcacatgcataaagcactaactataaatctctgttcagggggacacaatgtataaaggtgtaatttgttatgataacaatgttaagatgaggagtggcatggagctacataggatcaagttttatacactattgaaattaaaatattaatctgaaataggttgttataaattatgatgttaatgataatccccagggtagccattaagaaaataactcaaacatatataataaaaatgggaaatacaatggtacagtagaaaatatttatggttcataaagtaaagtagtaattaaaaaagtgaggaacaaaagagacatcaatatataaaaaagggaaaatatcagatggtaatcctatttcatcagtaattacactaaatgtaaaagtgttaaaacccccaagaagcaaaggttgagtaaatgaatttttaaaataaaccaactgtatgctatctataagatacatgttgtaaatctgaaatctcagataacttgaaagtaaaagtatggaaaagtcaccccatggaaatgataatcaaaaaagagctagtggctatactgttaataatatcagacaaataaattttaagacaaaaattgttactggagacaaagaaggacattcttttgtgactaagtgttaaaaatatatattttttaatctggaaggaaattaaccacttacatcttctgatgttgataatgtacaacaatttttttaaataagtgtttctaattttgccatattttctacaaccagcttatattgtttttaaattatttaaaagtttttacaacattctgcaacaattcagcagccttttatttttaccattcccaggtcttgtaggtgacaggtacaggtctttccatcataaatataagcaggcattttctctgggatcttaggcagggacatcttggggtacttcacttaaggattttctgaaggaaaaaggtttaaccaactggaacccatgagtacttccttgagctcctgacctgtctgggcaggacccccgtgttctactccaacttcatcgatcattcagcaggttatccatgatagttgtcttccaaaataaaagaaaaaagaaaaagaaagaaaagtcaaaggaaaggattctgctttttagaagcatcaggtggatggaacgtacaccctgggttagaaaatatgctgttctaatgtgttacattagagtgagctgggaagactccataaataaggagatagaaagtaggccaactcttcaccaatttctggagctgggagtaaaaacaatttgaaaaagagataatcgagagaatgagtagcctgagcaaagtcataggggtaagataaaacgacataaagctaaaaccagaatcaaagccttgcattgctcccaaattaatattcaaagttgtataatgctcaattcccccattgaataattttccttttttgcattccatgtccatgatccatggcccagttataggcatgaggaccccacccatggtctctcatcaaaccccttttcactgatatggaaggcgattagttggtgattttgtaatgtgtatgtgagatgaggagctagttgtatgtgagatgaggagctagattagtggtttccaaaatttattctttgtatttctgagatatgtgtgtgggaagaatgacaagaagtctcttgtctctgattcaaactgaaggtctctgattttgtcgataaatttgccttccctatattcttttacttggaaaaatattttcacagctcattagatgttttagaaacacagtattttaagatcttgatatgctgtgcagttccgatagcctataaaacaaatagtggttttaaaacatatcctcaaattattttacactcttcccattaagaggtatgactatgttccctaaccttgcacctgggatccttaagccatcatgcaaaatatctagccatgtggagggaccactggaaagatcacacacacacacacacacacacacacacacacacacatacagagagagagagagacacctgagaaattccatctggtccaactgctggctgttgaagtcctcccagcccagaccccagacactgaatgaaggccttgtgatatagtcaagagcaaaaaaacccagaagattgttattgttttaagtcactgttttcagatagattgctatgcagcaatagattattgaaatagacactacaattttaggtactattattctaagaatattgaattttatttttctgctaatgttctattattttacttttctctgggttttagaaagccaccaggatttaagacagtgaagaatctttgagtcctttgtagagttgaaccaaagtttgaatgtctctttgtggactcgtgtcctagggataccactccaaagggaaaaggggaatatcccttacatatctttgactttggtatccctgattccttcctttttctatagaatgtgtctcatttcagagaaactggtctcttgataatagccatagattacatactgtggtcttcctctacatagaccctacctcacctaccactcctggtcttagctgaaaaacaggctagcctcgactcatactgtcatttcctatcctcccactgaagtgcactggctcagcagatttattactccatagatttattactccattctatgattcatcctctctgcttcctataaaaggcagagacagagcttccagaggagcagaggggctgagaccaaaccagaaacctccaattctcatgtggaagcccatgccctcaccctccaacatgaaagcctctgcagcacttctgtgtctgctgctcacagcagctgctttcagcccccaggggcttgctcagccaggtaaggtccctctctccttctccttgaagcacattgccccctctctgggttatcctggaccaatcaagaagacctgatacccacagtctcactttaacagctacttttccaagataaggtaacttagaaaaaggataaggggtgagcccaaccacacagctgctgttgggtagagcctgaactagaattccagctgtgaaccccaaatccagctccttctaggattccagctctgggaacaccctcagtgcagttaccactccagctgcttccagcagaatttgggatcagggtgatcaaagacaggaggcttctggggatgggtgtgcgggctgtttccagataccgggagacccagaatctggtctgtggaagcccagcttccagaaacagcagctctgcagaggtggtacgtatcagggaaactcatgaccaagcattgaatgctcagagcctaaaaggggatccatagttggggtacccttgctctaaggaattggattattatattagcccctcctagcaatgcccagagtagccatcaattcctcttccgtctttcaactggtgatggtgcatccctatttcacagtccataaaagtgaaagggagtttatgaaatgcctcaaagggcagagacattgggtttgggatgggcagcttttccctccacctcttcctttctttctgattccttcttcttaccattccctgttttacaaacagaaagacccaggacacaccctcaatggacttttcttcttgttgtttcattgcagttgggattaatacttcaactacctgctgctacagatttatcaataagaaaatccctaagcagaggctggagagctacagaaggaccaccagtagccactgtccccgggaagctgtaatgtatgtggacgatgaccacccacccctcacacctcagtcctaggttcttccctgggcagggaataggactagtatcagaatgagttggagtcaaatactgtgatgcatacagcatctctaaccttatcccagacatttgccagtgagaaacaatacaagtaaagaaagtggcttctcactctcagctccctttccagctatcattttacatctcagttcgttccttcatcctggaaccaagagagattcacttgggctaccaaaaagagctgcttctctgagtccccttcctttgttttatcttcttccttcatccctgaggcatccccatcagctaggctgatgggctagacagatttcccatagacttggtcacactcccaggctgaaccctcaaggtgttccatctgactgtctcctttctgctccacagcttcaagaccaaactggacaaggagatctgtgctgaccccacacagaagtgggtccaggactttatgaagcacctggacaagaaaacccaaactccaaagctttgaacattcatgactgaactgaaaacaagccatgacttgagaaacaaataatttgtataccctgtcctttctcagagtggttctgagattattttaatctaattctaaggaatatgagctttatgtaataatgtgaatcatggtttttcttagtagattttaaaagttattaatattttaatttaatcttccatggattttggtgggttttgaacataaagccttggatgtatatgtcatctcagtgctgtaaaaactgtgggatgctcctcccttctctacctcatgggggtattgtataagtccttgcaagaatcagtgcaaagatttgctttaattgttaagatatgatgtccctatggaagcatattgttattatataattacatatttgcatatgtatgactcccaaattttcacataaaatagatttttgtataacagctgccattcatggttttttaaaaggataaagtaataaagctggtgggggtaacagggtgacaaggtgaagggcgtggttgcagaggttgggctcacattgtggagaaatgagcgcgtaatggactctgggctttcccccaggccaggctcacctgcatgttagggagaggcagccacaggctggggccagatgaacccaccccccagctccagatctgacatctgcttcagccacttgttcaaatacctttcttttttcccaaactcattctttttctcaccatcccacgctctacccaaaagcctgtcccctcttctattctatcagccttgtgactggctggttttcccccttctaatcaatcctctagtctagtaaatacaaatgtcactttcattaaaaaatcaagtaggagaccaacagatgatttggcaagtgcctgccatcattgatttctgccaccattggtgttcagaccaagtccaacatccctttctaccccttcttcagcccaccagttctcacccccaaacaccaaagtcaaccttaaacaatgagattcagaaaatgtgaataagtattcagttcattcaaggacaaagcttgagggtggccacttggaaaagcatcaactccaaacaaccggaaaagtttcagttacataagtaaagacagaagttccagccagattacaacatttttcatactagacaaggtgcatacaccacagtgatttgattggttataggttgctatgttctaaggaagattatttgctattccttaaggagaggtaatgatctgaggggtcttacctctgccatggctcagtcttcttaattgtttacaggaaacagcaaaaatgcagaagttgtaggtgcatgccacacaactcagattgcatagccacattcctctcaaggctcagaataattaaagtcctaatagctttaagtttaaattatttgaagtttgacttatttaatttaatttcacaccaataaggagggtaatcttaaattccaggagagaacaaccagcaggcagaccaggagtagaggtgaatgaatagatactgtgagacacagtatttgatacatgcaaatattaagcagagtgtttgatggtaggacaggaaaggagagaagggctacatgtgctcaaggtcaaacagaatctgctgaaacttcattttcaaaaaattataaaatcatgtgttttcatgcaggccttgtactcttgggcacagagaattagaaagaacaggaacagagaggctggtatataactgggcattgagttcaatgggattcaaagattaggctagttacaccagcaatgtgcctagtaaatttaggcaagttactttacctgagcaagcctccatagattgagatgtagagtaggtcaatgagtcgtattcacatcaacatcacttagatgctaataaaaaaacacagatttccagataccatcagcaaagactctgatatggagtgttgggtggggaaggtgtcacttacacatttttaactatttctcagtcatgtcttgggaccagtgagtttccctgacactctctttttcagatcaatgtagtctccaggcttgatctgtgacctctggcttaggcgtaaggagtgttttttgctggaactttcccacctcctagactttgctgctggacatgtgccagtcataagtagcagagactgcaaatgtcccccagatatctgtgggctcttctatattctccagcccaaattgcatttacccaggggctgtgtgattgaattctaaccagttgggtgagggctaaaatgatatgagccactttcagaccttgtccctataaacagctctctcttcctctgttgtggtaatgttaggggtaatgtgttccatatagctcaatttcaagatggaagcagtccatatccacaagtcactggtcacctggcctaccttgaactgtgacatgagaaagaaataaacatttgctgtgtcaagccactaagcctagtttggagcctattttaaccctgattaatagaggaattagtagcacaatcatgtgctaccattaagaacatgaaaaatgtagcattaactagatatttagtagcaggcagtgaggaagctgatgtcacagtttgaagaaaataagagattcatgttacaaactgtcaaacctgtcaggtgctatctgctgaaatagcagctccaaggggaaagtttgataaagatacattagtagcatgttgattgtttttgtcttcctttttgaagggattccgagaaagagatgagctcagaaaaaaaaatcaactggtcataaggtagaaatgaaagataataaaatccacaaatccaggaccttatgttgttggaaaagccatctgtttctgggtcccaaatattaagagaaggtatttaaggatgaaaaaaaatcagcaataaaagtctatggggaaaaaaaaaaaactcttagttggatgaaataacatagggcaaaaatcagattgaagttgtagcctaacattcaagcctcacagccttccctattaagaagagaaggagaaggagaaggagaagaagaaggagaaggagaaggagaaggagaaggagaaggagaaggagaggtagagggagagggagagagagagaggaaaaataattggaaaattataccaagaaagaaacttgggctgtggctgctggcatatggaattgactgagagtgaagatatcagaagcccactgttattaccagagctgtactatattgtcagtgaaaccatgagtggtcctgacaagttcaaaaagaagacaaactccaggccttgctgtacagcttgcagtcctcaaagacagcagagcccccaagaagagcatgtctctcttcaatactcacttcagaggtgaccaaaggggaataatggaaaaggagggaactcacaaaggaaaccagaaaccaggatcaacaagacaacagagctcccccagaaagagagaaccagtctaatcaaggatgggggactttttttttctttttattatactttaagttctcgggtgtgtgtgcacaacgtgcaggtttgttacataggtatacatgtgccatgttggtttgctgcactcatcagcttgtcatttactgtaggtatttctcctaatgctatccctcccccagccccccaccctccaaaaggccccggtgtgtgatgttctggatggcagacttttataacatctgtctgaaggattttaggcttggcacagtgcattggccattgatgaatgccatctttctttccataaatgagagtgttgattacaagtaccctgtccttttcaaacttgaaactttaggtaagtgacaaattatttgtctttttagctcatagggtcactggacaaagtagatccataatctcagctgatggagataactaaccatcatcaagagatcctgtccatttaggttggtgcaatgactaaatggcaccttgggttgtctctcttgtgggtggattatttgtgtattctacatgtgagaagaagtaagcaaaaggcagattctaacagaaattattagtcttcaccaaatattcatgtgatcctcttcatgtctcagctcctctgcagttattctggagttggatgatgagtgaaggccaatgtgaagtaggcagaagtgacgtaagcagcttttatgtctggttctttaaaacatcctacacaatctatcaaccctctctccactcacatctgggaacttggaagccatatgttccataggaaagctgtaattgacaaacagcctgaatctatgagtcattccttacaagagagcacttttggagagctgcctaaccaacatcaggctacaatacaaacaaaaagtaaatattgcagtaagccactgaggttgttgttgttatagaagcctagactagcattaccctggccagttagcccagaaaagtagctatgacattctgtgcctcagttttccacctctgtacaaaaaagtaaagttgattgccctaagaggattataacaaaaagaacattttaggccaggtactgtgtctcactcctgtaatcccagcactttgagaaaccaaagtggaggattacttgaagcaaggagttcaagaccagtctaggcagcaaagcgagacccccatctctacaaaaaataatattagacagatgtggtagcacacctatagtcctagtgactctggaggctgaggcaagaggatctcttgaggcccaggagttcgaggctacagtgagctatgatggtgccactgcactccagcctggacgacagagtgagacaccatctctaacaaaataaaatattttaaaaattttttaaaaagaatattttaaataaaaaggctttgggaaacctcaaggcaatctgggaagcaggcttcactttcataaataatttcacagaagaggaagatatttaacttctctaagtctcctttctctcatctttaaaatggacttaattagaataagtttgttcggaggattaaataagtcatctcatgtgaaatgaagtaagatagagccttgcatagattgcataggttagcattgccattgataacttactatctgctggacacattgttagcatgtttacactaacatcgagtttggtgtaattctcttccaaaagtgataagaaactgcagaaatgagctcagtgatgcttgagaaggaggagtaatgaaccctacgttggtcctcttttgcacaaagggagattgagactaagagttacgaaacatttcagaagacagggagtcaaccaacaggggctctagaatcaactcagcctaaagcacacagttcccttaaggattttttcactagtctccaagcctctggtgtctattcttttatttttattttttaaagagagggttggaataaaatcaacgtcaatgtctctttccagtttgtctataactttgcaatattagaggagatctggaacacagctacagaacaaagacaggagtcctgattcctgggatccttgtctgctgatcactgatcactcacctctccctgaaaaattcctttttttccttttttctttcttttttcttttcttttattttttctttttagaagtcagccgggaagttcgtcctgggcagaacctacagtagcacagcaaagccgctgtagcctgactgcctctgttgtttcatctgggcagggtatctctgaaagaaaggcagcagcctcagttacaggcttatagataaaattcccatctccctgggacagagcacctcggggaagggttggctgtgggcacagcttcagcatacttaaacgttcctgcctgccagctctgaagagagcagagggtctcccagcacagcacttgagctctgctaagggacagactgcctcctcaagtgggtcactgaccccagtgcctcctgactgtgagacacctcccagcaggggtcaacagatgcctcacacaggagagctccagctggcatctggcaggtgcccctctggaatgaagcttccagagaaaggagcaggcagcaatctttgctgttctgcagcatccgctggtaatacccaggtaaacaagtctggagtggacctccagcaaactccagcagacctacagaagaggggccgactgttagaaggaaaattaacaaacagaaagcaataacatcagcatcaacaaaatggatgcccacacaaaaaccccatccaaaggtcatcagcatcaaagatcaaaggtagataaatccacaaagatgaggaaaaaaaagagcaaaaatattgaaaattccagaaaccagaatgcctcttctactccaaaggatcacaacccctcgccagcaaggaaacaaaactggacagagaatgagtttgacaaattgacagaagtaggcttcggaaggtgggtaataacaaactccttcgagctaaaggagcatgttctagcccattgcaagtaagctaagaacctcgataaaaggttacaggaactgctaactagaataaccagtttagagaagaacataaatgacttgatggagctaaaaagaaaagcacgagaactctgtgaagcatatacaactatcgatagccgaattgatcaagaggaagaaaggatatgagagattgaagatcaacttaatgtaataaactgtgaagacaagattagaggaaaaaaagagtgaaaaggaatgaacaaagcctccaagaaatataggactatgtgaaaagaccaaacctatgactgattggtgtacctgaaagtaacggggagaatgcaacgaagttggaaaacacacttcaggatattatccaggataattttcccaactagcaagacaggccaacattccaattcaggaaataacagagaacaccactaagatactccttgagaagagcaaccccaagacacataatcatcagattcaccaaggttgaaatgaagaaaaaaaatgctaagggcagccagagagagaaaggtcaggttacccacaaagagaaactcatcagactaacagtggatctctctgcagaaatactacaagccagaagagagtgggggccaatattcaacattcttaaagaaaagaattttcaacccagaatttcatatccagccaaactaagctccacaagagaaggagaaataaaatcctttaccgacaagcaaacgccaagagattttttcaccaccaggcctgccttacaagatcccctgaaggaagcactaaatatggaaaggaaaaaccgatacaagccactgcaaaaacataccaaaatgtaaagaccaatgacactatgaggaaagtacatcatgatgacaggatcaaactcacacataacaatattagccttaaatgtaaatggactagaggccccaattaagagacacagactggcaaattggatgagtcgaaacccattggtgtgctatattcaggagacccatctcacataaaaagacacacataggctcaaaataaagggatggaggaatatttaccaagcaactgaaaagcaaaaaataaataaataattaaaaaataaaaaagcagggcttacaatcctagtctctgataaaacaggctttaagccaacaaagatcagaaaagacaaagaagggcattacatgatggtaaagggatcaatgcaacaaaaagagctaactatcctaaatatatatgcacagaatacaggagcacccagattcataaagcaagttcttagagacctataaagagacttagactcccacacaataatagtgggagactttaacaccccactatcaatattagacagatcaaggagacagaatattaacaaggatattcaggacttgaactcagctctggaccaagcggacctaatagacacctacagaactctccaccccagatcaacagaatatgcattcttctcagcacctcatagcacttattctaaaattgaacacacaattggaagtaaaacacgccttagcaaatgcaaaagaacggaaatcataacaaacagtctctcagaccacagtgcaatgaaattagaactcaggattaagaaactcactcaaaacagcacaactacatggaaactgaacaacctgctcctgaatgactcctgggtaaataacaaaattaaggcagatataaataagttatctgaaaccaatgagaacaaagacaaaatgtacctgaattcctgagacacagctaaagctttagagggaaatttgtagcactaaatacccacatgagagagcaggaaagaactaaaatcaacaacctaacatcacagttaaaagagctggagaagcaagagcaaacaaattcacaagctagcagaagacaagaaataactaagataagagcagaactgaaggagatagagacatgaaaaacccttcaacaaatcaatgaatccaggagctggtttttttgaaaaaattaacaaaatagatagactgctaaccagactaataaagaagaaaagtgaaaagaatcaaatagagacaataaaaaatgataaaggggagatcaccactgatcccacagaaatacaaactaccatcagagaataccataaacacctctacacaaataaactagaaaatctagaagaaaaggaaaaattcctggacacatacacactcccaagactaaaccaggaagaagtcaaatccctgaacagaccaataacaagttctgaaatggaggcagtaattaatagcctaccaaccaaaaaaaggccaggatcagacgaattcacagccgaaatctaccagagatataaagaggagatggtaccattccttctgaaactattccaaacaatagaaaaagagagactcctccctaactcattttatgaggccagcatcatcctcataccaaaacctggcaaagacacaacaaaaaaagaaaatttcaggccaatatccttgatgaacattgatgcaaaaatcctcaataaaatactggcaaagcgaatccagcagcacaacaaaaagcttatccaccacaatcgagtccgcttcatccctgggatgcaagtctctttcaacatatgcaaatcaataaacataatccatcacataaacagaaccaatgacaaaaaaaccacatgattatctcaatagatgcagaaaaggccttcaataaaattcaacacctcttcatgttaaaaacactcaataaactaggtattgatgcaacatatctcaaaattgtaagagctatttatgacaaactcacagccaatatcatactgaatgggcaaaagctggaagcattccctttgaaaaccagcagaagacaaggatgctctctctcaccattcctgttcaacatcgtattggaagttctggccagggcaatcaagcaagagagagaaataaagtgtattcaaataggaagagaggaagtcaaattgtctctgtttgcagatgacatgattatatatttagaaaaccctgtagtctcagcccaaaaactccttaagctcataagcaacttcagcaaagtctcaggatacaacatcaatgtgcaaaagtcacaagcattcctatacaccaataatagacaaacagagagccaagtcatgagtgaactcccgttcacaattgctacaacgagaatagaatacctaggaacacaaattgcaagggatctgaaggacctcttcaaggagaactacaaaccactgctcaacaaaatgaaagaacacaaacaaatggaaaaacattccatgctcatggatagggagaatcaatattgtaaaaatggccatactgcccaaagtaatttatagattcagtgctattcccatcaagctaccattgactttctttgcagaattagaaaaaactactttaaatttcatatgaaaccaaaaaagaccccatatagccaagacattcctaagcaaaaagatcaaagctggaggcatcatgctacctgacttcaaactatgcaacaagcctacaataacaaaaacagcaaggtactggtaccaaaacagacatatagaccaatggaacagaacagagcctcagaaataacaccacaaatctacaaccatgtgatctttgacaaatctgacaagaacaagcaatgcggaaagggctccctatttaataaatagtgttgggaaaactggctagccatatacagaaaactgaaactggaccccttccttacaccttatacaaaaattaactcaagatggattaaagacttaaaggcaagacataaaaccataaaaaccctagaagaaaacccaggcaataccattcaggagataagcatgagcaaagtcttcatgactaaaacaccaaaagcaatggcaacaaaagccaaaattgacaagcgggatctaattaaactaaagagcttcttcacagcaaaagaaactatcgtcagagtgaacaggcaacctacagaatgggacaaaatttttgcaatctatccacccaacaaagggctaatatccagaatctacaaggaccttaaaaacatttacaagaaaaaaaaatcccatcaaaaagtgagtgaaggatatgaacagacacttctcaaaagaagacatttatgtgatcaacaaacatatgaaaaaaagctcatcatcactggtcattagagaaatgcaaatcataaccacaatgagataccatcacatgccagttagaatgtcaatcattaaaaagtcaggaaacaacagatgctggaaaggatgtagagaaataggaacacttttacactgttggtgggaggagtataaattagttcaaccgttgtggaagacagtgtggtgattcctcaaggatctagaatcagaaataccatttgacccaacaatcccattaccgggtatataaggattataaatcattctattgtaaagaaacatgtacacgttatgtttactgcagcactatttgcaatagcaaagacttcaaccaacccaaatgcccatcaataatagactggataaagaaaacgtggcatatatacaccatggaatactatgcagccataaaaaggaatgagttcatgtccgttgcagggacgtggatgaagctggaagccatcactctcagcaaactaacacaggaacagaaaaccaaacactgcatgctctcactcgtaagtgggagttgaacaatgagtacacatggaaacagggaggggaacatcacacactggggcctgtcggtggatggcaggcaaggggagggagagcattaggacaaatacctaatgtagatgacgagttgatgggtgcagcaaaccaccatggcacatgtatacctatgtaacaaacctgcacgctctgcacatgtatctcagaacttaaagaataataataaaaataaaagataccttttccaattaaaaaaaagaaaaaaaactctttagaagtcaatattttgttttcacaaggggggatccatttcctgcccatcactcaggatcattcctgatcaaggcccctcattcatcaggcaccaaatcacaggcaagaaattggtctactctacttcattgctgaaaagaaagcctccaagaaagaaagagaaaaagcccttgaagctgcccctgcttgctagggatggccagtgagctggatgaaacagctgcagagcttggatatctaaagattgattttatttatttccactgagccactgaggtttttcaggtgtagagtaaatccaaagcccattaactccaaagccatttttcaaggaaaacacaaaaatgaataatcgcttgctgataattcctttaaattcccgccagagttatgaaattattcttactacagaaacaatcattaaaccacgtcagacaaacacctctgaggtcaataatattccaaatttattctgccgagaattttttaaaacttcgtatctgccacatgtgcaactcaggcattcttggaaaccatccctgcggtagcatatctttacttggaagcagtgggaaaacttggaagaatatttggagaaatatccagactctgaggtctttccagcattcccaatctgcccttcttttttttttttttttgagacacagtctcactctgttgcccaggttggagtgcagtggcatgatctctgcccattgcaacctttgtctcctgtgttcaagcaattctcatgcctcagcttcctgagtagctgagactacaaacaccatccaccatggctggctaattttttgtatttttagtaaagacaggttttcaccatgttggccaggctggtcttgaactcctgacctcaagtgatctgcctgcctcagtctcccaaagtgctgggattacaagtgtgagccactgtacccggccctatttcctaataataaaaaacagtaacttctactcactgagtacctacagtgatttagtcattcttctaagcagtttagatacatgaactcatttaattcacacgacaattccctaaagtacacatgattagtatcctgctcttaccctagcagagagtggttaagtaagttgtccatggtatcacagctagtcagtcacagagccatcatccaaatgcagatatcctgaattcaggttctacattagactaacccaccaggaatggagcaggaaagaacagggaagactccacatttttggcctctatttggtaattatagttaactttttaggtaattatagaccaattatcctagatgggcacttagagactttgcaggacagcaagagctgtctctaatcctgtgcccatgacagacatcaccagtcaaccacaacacagtatttaactaacgcaagtcaactcctcagaatctttaacattcttgtttgtgctactgtaccaatcaatcaatttgatatgagagtgtgcaggaaaaaacaggaaacaggtttgcagtacctccacaccagtattcaatgctgtaatccgctgcagtgactccattaaagactttgcctcccttataccctctccaactagggtgcctagtgttatgaacaaagggatatgtataggttcttgtgttgcctctctctttgatatttttagccatcagataccttgtctgcaatgtgtgctcagagagtgaggggggaactagatgattgattttccaaatgtgttccctaaatgtgttccctggggaataagggcacgagaggctgcctattctatttcaaacaaatccccttcactacagtgtatttgatgagttggggtttgttttaattccatttggaaaagggctttagcagctaagcaaatggttttaaagtgcctcagaagtcaagattaatagaaactatccagttctgatgtcctatcatgctaaaatttcagggactaagattctgtgatcattacattgaaacacagcagcaaagctgtggtgtgttgtccttcctggttcagagatgcaactatgtgcagggctgctgagctctctctgcatctgggtgggagcctaatggaagttttggggctccttcctggtctccaaaatcctcaagaccaccatgtgaacacaggaatcaaggaaggttcttagatcgactcatcccccaggcctttggtttccttgctcctttccccaactacaggtgtttcatttcaactcatcccctagggccttggttttcttgctctcttcccccactacagatgtttaacttcatttcataaccacatattcccctccttttccaaggcaagatccagatggattaaaaaatgtaccaagtccctcctactagcttgcctctcttctgttctgcttgacttcctaggatctggaatctggtcagcaatcaggaatcccttcatcgtgacccccgcatgggcaaaggcttccctggaatctcccacactgtctgctccctataaaaggcaggcagatgggccagaggagcagagaggctgagaccaacccagaaaccaccacctctcacgccaaagctcacaccttcagcctccaacatgaaggtctccgcagcacttctgtggctgctgctcatagcagctgccttcagcccccaggggctcgctgggccaggtaagccccccaactccttacaggaaaggtaaggtaaccacctccagagctactaggtcagcaagaatctttacagactcactgcaaattctccatttgaaaaatagggaaacaggttttgtgggtggacaagaaatgcctcaacctcacatccagtcactggaagagccagaactagaaagctcccgagtcttttccccacattcaagagggttgctgggtgcatccatacccagctatccttacagtgtttgggaatggggaatggctctgtcttactgtgggcatggtgggcatttttggcagtgggagagaaggaaaatctgttgattagaagctcagtatgttaattcgactccaggacagctttcagagacagtggctaagagaagaacgaggtcccagggggatctcttgaggtgacttattttgacactctttgggaaagttatctaggagatttgttccataactcattttcccatactctggtgacaaatttactgagtgtatcggtcccactgagccagtgcatagcatggtaacaaacagttctaaattatcaatgacttaacagaattaactaaattaacaaaagttactttctcacttgtactaaatatctataatgtatgggctcaggcttctgcattttatactcaggattctagactgatggagaagttgcccatgtgggggaacattgatggatactgtgataaagcagaagaaagctctcaggagtcttgcataggcaatgcactgtggctcaaaaatgacacccatcactttgtctccttctttattgatcaaaactaattaatgcctccaaccaaacaaaagtggccaagaaatgcaagtctaccttgtgtctcaaaacagaggatggagaatatttggtgaaaattaccatgaccatcacatggccacgtaggtctttataatgacagagctagcatttgtcacattgaccaagctttgtccatacactctacagtaatgatgagtcctcagtgcacaggggaggatgctgaagacacaggacagcatcctccagacacataagacttcagagcagagggattctccctccacctctcgcaattccttgctttctcctaacttcctttacaaagtcatgcttggaaatgtctatgtatcatcatgtggctcatttttttctctgttcattttttttccccaaaattcagcttctgtcccaaccacctgctgctttaacctggccaataggaagataccccttcagcgactagagagctacaggagaatcaccagtggcaaatgtccccagaaagctgtgatgtaagtaaataaagttcaccctcccctagacaaaaaaataatgtctagggcacagagtcaagaactgtgtcacagttgctgggagtcatagactctgatagtttgacctctatggtccaattcattaattttcacaagtgagtgttcactcccagctccctgcctgggagattgctgtagtcatatcaatttcttcaagtcaagagcaaagatggttttactgggcctttaagagcagcaactaacccaagagtctcatccttcctcctctccgtagcaaccctttgtccaggggcagatggtccttaaatatttagggtcaaatgggcagaattttcaaaaacaatccttccaattgcatcctgtatctcccacagcttcaagaccaaactggccaaggatatctgtgccgaccccaagaagaagtgggtgcaggattccatgaagtatctggaccaaaaatctccaactccaaagccataaataatcaccatttttgaaaccaaaccagagcctgagtgttgcctaatttgttttcccttcttacaatgcattctgaggtaacctcattatcagtccaaagggcatgggttttattatatatatatatttttttttttaaaaaaaaaacgtattgcatttaatttattgaggctttaaaacttatcctccatgaatatcagttatttttaaactgtaaagctttgtgcagattctttaccccctgggagccccaattcgatcccctgtcacgtgtgggcaatgttccccctctcctctcttcctccctggaatcttgtaaaggtcctggcaaagatgatcagtatgaaaatgtcattgttcttgtgaacccaaagtgtgactcattaaatggaagtaaatgttgttttaggaatacataaagtatgtgcatattttattatagtcactagttgtaatttttttgtgggaaatccacactgagctgagggggacaaagatggctgtggccaagaggggcttggttaagggggtgggaactatgtccctgggaaatgagtttttggcttagctggtcttcattgaaatgcagggtgaaactgacaaacccattccagccctctattcccattttcaacagtatttcccagaccccaaacttcagccacgaaaatatctggagctttgccaccattcctttcctccccacctcatacttgcctctcctgggacctattttaacagccctgtggtatctccctctacccgaccctgctcctcggtcttccaacccagactaggcagacatgacagacactggaaatcagaggaaggctaggtgacctttgaccagaggtttaggtgcaggttttacaggtgtggtggagcttaaagtgggtcttgtgcatgcacaaagtggagaggctctgctggaggtatttcagtctaggtagaggagaaggggtgttgcttgggcaaaatccaagaagtaggaatgatcatgctgcatttacccagttgggtgggagcccatcaaaagatgtcagtgttggagtatgtgtgaaatggtggggaaatttggaaagaagtttgagaccaggctgtctaggtggggagtttgtgctccatgtaaggtgaacatatggttcttcccagcccagttaggatgcttttgagagcagaaaagtggtattattcataattattctggaacaacggatataaattaacactgtcctaagcaaactggagcatgtggtcactctaggaatagaatgcattgcaagttttgattcagtggagagaagtgccatgaccacactatgaggggcttcaggaagggcagccaggtggccatgggctgaattgggaggagaagggagaagcacttagctcactattgcagtgtatggaagatatggaactggggcattggtagttgggaggggagaagataattggaagaatggctgaggcagggtggaatgccaaatgttgtggttgaagaagtagaaccaatgacatggaaactttctaaatgccaaagctgcaattaaaggttagcttcttagacccagaaaattaatttctctctgtcactgtttactcacaccttaactttactagcttgagagctttcaatcaaatggacaggacctcatcttcctgtataagcaacttaaatcaggattccctttcagcatacaaaatcagcttgcgtttccattggtcacattacctatgtacctgaacgcagagaccaactatgtccccaagggtagaaaagggtcacaggtgccctgctggtataactctgcatggtctaaggccattgatctggagggccaatggcctactgtgtcatgcatgcccagcagggtcgctgcatgcaaagctcccagaggcaccattcataaggctgtcccccttggactgtgtggtggcaatggcacaaggcaatataaagaacagaatgagacattaggaagggcactgatctaggaggcagatgacctcagtttcatcacagacagagaactggtctctgtcactgtgttacttttggctttagttaccccatccataataggggtatattaatatcttttaagggatctgaccaatgacccaccaagatctcctgttctgagagcactacctcttggaaagcatcactacctccacccattgagggagggaatgttgtcagagggttccacactcacaagcccaagtcggacaggggccaggataactggcacacttactctatttctagaagatttctctgtgagagccgcaagtagaagcatggatccctagaaccatcagagagctttttgtatctactacagaagggctcccactcagagcaatcactggccctcactctgagtacaaaaaacctctctgcctctcctatagcctagcagactttagccctaaacatcaatcaggatgtacctccagaggtcagcatgtccaggaggcatgggatggccacagaatagctcactgggatcagtagaccctcaggtttcaggtcagtcttcacgaggagatcaagaaggggagtagagggaagaggtgccctctgtttgtgaaggactgaacagaatttgctcatatcccctattcctctctcaaggaatcctgaacctaattaccctacaattgggaatagcatcaccagggccttgagtataaaactgtgggcacaaagcattggaggtgtttaagttttctgatggcacacagatctcaaccaggaatcagggatgtcaccaactcatttctctggaaagcatactattagatgaagatgttcatgcagggttcactgagagtatggggaagctgaactaaggagagggagaattgatattgtggtgcaattgcagcccaggtctcagcaatcccatagggagctttagaactgggatagcacaaatgaggtcgaggggccaggcttttatacccccatctgaaccagccctggctgcaggatgctcctggaagaggacacaactctgggcaaggcagctgtttttagctgacggcgggcctcatagaggaaattccgctgagaagcattggctgccaacacttctagcagctggggaagaagcactttagacctgggagggaaaaacttgggcagcacactatgaactccaccatgacccaccccttgtgccattcaaatccacttgcttatatacaaagttctggaaaactcatccagaaatctgttgagcctcattttttaaggaaacttgcaagaggaaggttggtggagtgaacagtagccacctacaacagctgcaactggtcttgaggttataaatgatgcttatcaccccactcctagaacactcattctagattttcctcaacctcagcccatgcctctgctggcctaagtggcttgccttcaggattcacccagaccctcatccctgaggggttcagcccctggtcttcacactcctctcaggacaaggatatggctgctactgttgtccatttgccattaaaattgggtcaagagacatccaaatgggtcacccagatgccaaacatattcttatctaaccccattgagtaaaagcagctccactcacttctgatgaccagggcccattaccctggcccggatagtgacctcttcctctccttgcctgttagtttcttggcctgcaagtctaaagagatagagtgcagccacagctgaggattaatgagactccctctaggaaccaaggggtaagcattcttcctctgggaaacaggatttctaaatccgtacagccctgatgtgcacaaatcccccaaagtggatcactaggagtaatggtaagtagggcaattttacttccacctttgacatgaatctatgaattttacctattgggaatacagcttcacttattatttgatttaaggtctatattgaatcctagaggatagtatttcttccttgtaggatactctttccaagctggtgccttaactgtgccttcagcaggccattccattactgtatcagcctggaaacctgtggataacacaggtatatagtgggatcagtggatccgatgaccatacacccagtgctgcacctcatttgctgtagtgtgtcttccagtctatagtgatgttatgtggcatgttgcgccagtgaacaaacacttgtaagctctcagataatggtgctgtctaaggtactggagacagaaatggcaaactcatacctggaaagtgtttctactccagttaagatgagtcattgctcttttcagagtagaataggtgcaatgtaatcaaacatgtactttccaccaaacggctggttagtctccctgatggatggatgatgccatagccggggatcaacaatgggctatgttactggcaggttggacattcagctacagggccacgtgtcatctgaactcctgctaccataatgactttgttcatattcttactgtcccattactgtggtgacaaataacagaagctggctgatgccaactggctgagtcatcttgttaccttagtcattctgtatgtccaaattcctgatgggattagtaccacatctttacatactgtgtcctgtctcataggttcgtccacttgcctctctgccagaacccctttcccccaaaatttttacctttgtctttccaggcccctgcccaatgatgcagaccattcaacactatctatctacgagtccatatatatatatatatttttttttatttttttattatactttaagttttagcgtacatgtgcacattgtgcaggttagttacatatgtatacatgtgccgtgctggtgcgctgcacccactaactcgtcatctagcattaggtatatctcccaatgctatccctcccccctcccccaaccccaccacagtccccagagtgtgatattccccttcctgtgtccatgtgatctcattgttcaattcccacctatgagtgagaatatgtggtgtttggttttttgttcttgcgacagtttgctgagaatgatgatttccaatttcatccatgtccctacaaaggacgtgaactcatcattttttatggctgcatagtattccatggtgtatatgtgccacattttcttaatccagtctatcattgttggacatttgggttggttccaagtctttgctattgtgaataatgccgcaataaacatacgtgtgcatgtgtctttatagcagcatgatttatagtcatttgggtatatacccagtaatgggatggctgggtcaaatggtatttctagttctagatccctgaggaatcaccacactgacttccacgatggttgaactagtttacagtcccatcaacagtgtaaaagtgttcctgtttctccacatcctctccagcacctgttgtttcctgactttttaatgattgccattctaactggtgtgagatggtatctcatagtggttttgatttgcatttctctgatggccagtgatgatgagcattttttcatgtgttttttggctgcataaatgtcttcttttgagaagtgtctgttcatgtccttcacccactttttgatggggttgtttgtttttttcttgtaaatttgttggagttcattgtagattctggatattagccctttgtcagatgagtaggttgcgaaaattttctcccattttgtaggttgcctgttcactctgacggtagtttcttttgctgtgcagaagctctttattttaattagatcccatttgtcaattttgtcttttgttgccattgcttttggtgttttggacatgaagtccttgcccatgcctatgtcctgaatggtaatgcctaggttttcttctagggtttttatggttttacgtctaacgtttaaatctttaatccatcttgaattgatttttgtataaggtgtaaggaagggatccagtttcagctttctacatatggctagccagttttcccagcaccatttattaaatagggaatcctttccccattgcttgtttttctcaggtttgtcaaagatcagatagttgtaggtatgcggcgttatttctgagggctctgttctgttccattgatctatatctctgttttggtaccagtaccatgctgttttggttactgtagccttgtagtatagtttgaagtcaggtagtgtgatgcctccagctttgttcttttggcttaggattgacttggcgatgcgggctcttttttggttccatatgaactttaaagtagttttttccaattctgtgaagaaagtcattggtagcttgatggggatggcattgaatctgtaaattaccttgggcagtatggccattttcacgatattgattcttcctacccatgagcatggaatgttcttccatttgtttgtatcctcttttatttctttgagcagtggtttgtagttctccttgaagaggtccttcatgtcccttgtaagttggattcctaggtattttattctctttgaagcaattgtgaatgggagttcactcatgatttggctctctgtttgtctgttgttggtgtataagaatgcttgtgatttttgcacattgattttgtattctgagactttgctgaagttgcttatcagcttaaggagattttgggcagagacaatggggttttctagatatataatcatgtcgtctgcaaacagggacaatttgacttcctcttttcctaattgaataccctttatttccttctcctgcctgattgccctggccagaacttccaacactatgttgaataggagtggtgagagagggcatccctgtcttgtgccagttttcaaagggaatgcttccagtttttgcccattcagtatgatattggctatgggtttgtcatagatagctcttattattttgagatacgtcccatcaatacctaatttattgagagtttttagcatgaagggttgttgaattttgtcaaaggctttttctgcatctattgagataatcatgtggtttttgtctttggctctgtttatatgctggattacatttattgatttgtgtatattgaaccagccttgcatcccagggatgaagcccacttgatcatggtggataagctttttgatgtgctgctggattcggtttgccagtattttattgaggatttttgcatcaatgttcatcaaggatattggtctaaaattctcttttttggttgtgtctctgcccggctttggtatcagaatgatgctggcctcatcaaatgagttagggaggattccctctttttctattgattggaatagtttcagaaggaatggtaccagttcctccttgtacctctggtagaattcggctgtgaatccatctggtcctggactctttttggttggtaaactattgattattgccacaatttcagctcctgttattggtctattcagagattcaacttcttcctggtttagtcttgggagagtgtatgtgtcgaggaatttatccatttcttctagattttctagtttatttgcgtagaggtgtttgtagtattctccgatggtagtttgtatttctgtgggattggtggtgatatcccctttatcattttttattgcgtctatttgattcttctctctttttttctttattagtcttgctagcggtctatcaattttgttgatcctttcaaaaaaccagctcctggattcattgattttttgaatggttttttgtgtctctatttccttcagttctgctctaattttagttatttcttgccttctgctagcttttgactgtgtttgctcttgcttttctagttcttttaattgtgatgttagggtgtcaattttggatctttcctgctttctcttgtgggcatttagtgctataaatttccctctacacactgctttgaatgcatcccagagattctggtatgtttgttctcattggtttcaaagaacatctttatttctgccttcatttcgttatgtacccagtagtcattcaggaggaggttgttcagtttccatgtagttgagcggctttgagtgagattcttaatcctgagttctagtttgattgcactgtggtctgagagatagtttattataatttctgttcttttacatttgctgaggagagttttacttccaactatgtgaccaattttggaataggtgtggtgtggtgctgaaaaaaatgtatattctgttgatttggggtggagagttctgtagatgtctattaggtccgcttggtgcagagctgagttcaattcctgggtatccttgttgactttctgtctcgttgatctgtctaatgttgacagtggggtgttaaagtctcccattattaatgtgtgggagtctaagtctctttgtaggtcactcaggacttgctttatgaatctgggtgctcctgtattgggtgcatatatatttaggatagttagctcttcttgttgaattgatccctttaccattatgtaatggccttctttgtctcttttgatctttgttggtttaaagtctgttttatcagagactaggattgcaacccctgcctttttttgttttccatttgcttggtagatcttcctccatccttttattttgagcctatgtgtgtctctgcacgtgagatgggtttcctgaatacagcacactgatgggtcttgactctttatccaatttgccagtctgtgtcttttaattggagaatttagtccatttacatttaaagttaatattgttatgtgtgcatttgatcctgtcattatgatgttagctggtgattttgctcgttagttgatgcagtttcttcctagtctcgatggtctttacattttggcatgattttgcagcagctggtaccggttgttcctttccatgtttagcgcttccttcaggagctcttttagggcaggcctggtggtgacaaaatctctcagcgtttgcttgtctgtaaagtatttaatttctccttcacttatgaagcttagtttggctggatatgaaattctgggttgaaaattcttttctttaagaatgttgaatattggcccccactctcttctggcttgtagggtttctgccgagagatctgctgttagtctgatgggcttccctttgagggtaacccaacctttctctctggctgcccttaacattttttccttcatttcaactttggtgaatctgacaattatgtgtcttggagttgccctgctcgaggagtatctttgtggcgttctctgtatttcctgaatctgaactttggcctgccttgctagattggggaagttctcctggataatatactgcagagtgttttccaacttggttccattctccccatcactttcaggtacaccaatcagacgtagatttggtcttttcacacagtcccatatttcttggaggctttgctcatttctttttattctttttttctctaaacttcccttctcgcttcatttcattcatttcatcttccattgctgataccctttcttccagttgatcgcatcagctcctgaggcttctgcattcttcacgtagttctcgagccttggttttcagctccatcagctcctttaagcacttctctgtattggttattctagttatacattcttctaaatttttttcaaagttttcaacttctttgcctttggtttgaatgtcctcccatagctcagagtaatttgatcatctgaagccttcttctctcagctcgtcaaagtcattctccatccagctttgttccgttgctggtgaggaactgcgttcctttggaggaggagaggcgctctgcattttagagtttccagtttttctgttctgttttttccccatctttgtggttttatctacttttggtctttgatgatgatgatgtacagatgggttttcggtgtggttgtcctttctgtttgttagttttccttctaacaggcaggaccctcagctgcaggtctgttggaataccctgccttgtgaggtgtcagtgtgcccctgctggggggtgcctcccagttaggctgcttgggggtcaggggtcagggacccacttgaggaggcagtctgccggttctcagatctccagctgcgtgctgggagaaccactgctctcttcaaagctgtcagacagggacatttaagtctgcagaggttactgctgtctttttgtttgtctgtgccctgcccccagaggtggagcctacagtggcaggcaggcctccttgaactgtggtgggctccacccaggagcttcccggctgctttgtttacctaagcaagcctgggcaatggcgggtgcccctcccccagcctcgttgccgccttgcagtttgatctcagactgctgtgctagcaatcagcgagactccgtgggcgtaggaccctccgagccaggtgtggcatatagtctcgtggtgcgccgttttttaagccggcctgaaaagcgcaatattcgggtggtagtgacccaattttccaggtgcgtccgtcacccctttctttgactcggaaagggaactccctgaccccttgcgcttcccaggtgaggcaatgcctcgccctgctttggctcgcgcacggtgcgcgcacccactggcctgcgcccactgtctggcactccctagtgagatgaacccggtacctcagatggaaatgcagaaatcacccgtcttctgcgtcgctcacactgggagctgtagaccggagctgttcctattccgagtccacatatattttaacctcaggccacctctctgtatatacaagtcaatgactagtttgagaaaactgctcaaactctatccattgagaggatttcccctcacttctccctttcaaggccatccctgagttgatctgtagagcaattgtcatcgttttttgtttgtgtccacatgctgagctgaaccatctttgaaccatgctcagcctttttcttcctccatcaccttgtcataagtgactcccaggcagccatgggtgtgaagtgagtgagtggcatgcagtatggatgacatgggggtctgagccatctgctcatatggtttactgtgcaatgccctttggcactgctgtgcccaatcccaatgcactgcctcaatcttacctctgggcccacctggcattatgatttggtaggtttgactgaacccagatcatggcgagcaaattctgcaaaattctggctacgaaaatcatttgatttcccatggccaggctctctgtctctgcaagagttcagtagcacaccggaaacttttttttcaaaaggtacaagttctcctcttcagacagcctgacttttctccaaaaccccaggttcttctactaaagcgtagatttcacagggcccagtgggtttcttttcccatccacgttaactctaataccataaggtctgcctggtttatgatccaagccacaggatctcttgtgccacagcctggacccattgcagagcccattcctactcagcatcccagtcactactggtaaccttctgtgtatgtgagtcagagtagccctgcctcctaagtagagaaaatctacctactgggcactgtgcttctttttaaatgggtggaggcatgagatgcaattattagtcttttacttttgaggaagtgtccctgtatgcccctagactcattgtatggggtattctggagctgaaatgacccttcagaattgaacaggcccaatttaggagacatggaactggagtttctatacctacatcaaccaattattgcacgtggactacacccagaaatgggacgtgaccttgaggaaggcagctctctgcagcccagagcaactcacagagaggcactcagcagacacttattgatcattgatgctgcagaagccaagaaaatgactaccttggtccaggcaggtagggggggctctaggtaaagcaacatagcaactactatgtgatgcagggcctgggcctcatgcatgatctacggctcctggctttgctgtgtagctaccttgtaagataactttgggaaacttctgttttctcactgggcattagtttactcaaccataaaacaggttctgaaactagatatatggcttctaattggctgtgtattaaaatcaccagggacttgtctaaaactacagattctaaattatcttccccaaagattctagttcaatgtattagagtagggatggggctagcggatcctgttgtacctcctggatttgctccagctctggtgtgcccccaaatcacttaatttccctggtaaatagggataaagacatctgccactggaggattatgtgaaataataggcaaatagcactgtaaacaaaggcatgtgggtgcatgctcagcatagttaaagagtgtgttcacgggccttgtgagtaagatacttggcttctctaagcctcagttctcttcttcatgataagcaccataaaagcacttacttcagagtcaatcagaaggattaaattagataacacacataaatttggtagttcctggcctggagaacaattcaatacaagtagccatcattatttattgagtgtctattgcatgtcagctgcatcactacatgctatgcaaataagcttatggaatgtttcttccaggaacttccaagcaaccctgggaaaggctagtagcaaataccagctggttctgttttgcggaagggataaatgaggcccaggatgagagagtacactgtagtaaaagactcgtgggatatatccaggacctgagcactgagacacctgggcctattaacagggatattaatcctgaatgactttaaggattttgtttctgttctcaggtctcagtttttctgagaaaggacagggtggaaaacaacagttctcaggtcctatttaattcttcctctaattgtgtaatctcagagggaatctgagacaaagaacaaagctgggagtccatgttttcaggtttacttccatcaaatggttctgcattccaggaagccaggagatctgttttcaccataagtgactcatttccagcccccatcaggagttatttctgaccacaggtttctcattccccagcagcagaaaatgtgaattgaatcactttagatggctactgtcaaggagtcaccaaaaatgagaaacagaaagaagctggacagccacccactctctgcagaagacagctgagctgggcagaacagctgaatccagatggtctgaaatgctggcttaacattctcacattcaacttctgcaggtagcatcaagttgaagtctgggaaggtaatctgcaaaatgaaaatagcaaacaaactgcctgttgtcactgaagtcctgcctatttatgacactgatatcactcagaagctgctgttcctggaccacattagccacatgcctctgaagcctggagtactcccgacgcttgatccttggcaagatatctgggacctcttccctttctctggcattcttcatcatttcttttccacaacacaaggcattccttggaaaacacagcccgctgcaacatgtttcaatttggaaacatgagcttctgtttgggagaaatcatgagaatgttattgtcttacactttgagtcccttcctagcatttcctagccatacttcttctgaagttcctaaaagtaacaactgttaagcttactgagaacttaactatgtgcttgtcactgtttaaagcacttttcatgtgtctattaatttaaccgttataacactataatcccactgtttccagaagtataaactgagatacagcttcttatttttcatcctttcccacatccagtgattgataagcatagggaatcagtctaatagatacaagtgggcattttgcctggcctagggacaagtacaacctaaggctttacctagaggaagttcagttgaaggttataagctgttgacttaaccttgatccaacatccaaaagagaatgctggtcccctctgggcaaggctcctgtgccttcttctatgcccatatgtcattcgcaggttttcaatgaagactgctggtctgtagagggcctgaggaaaacctcctcttttgattagaaaagaaaatataggcctggcctggcaggtttactgtcaaataaatgaaatgtacaactcaggcagtagaaagggtgttgtctaatgaaatctgagcagtctagtagggctacatggaggagggaggagggaagtcaagttagcaataatttctagaatttggaatagtggaggaaaaaaaagacaagaattcaaggagttaatggtgagtatcttcatgagcaagatggaggcagggatgagtgtgcagtgcaggggtaactagacaaatatccatgacacgcttccaagctggcatttgatgcagctatgctactgaatttctcaaccctgcaccaaccgtccactggagcaagtagaagctatgtcagtttgtctactaacattgcatcagataccttgccttgatatgcatttttgggagagagagctttaatggatcagtccatcccacactttgttgttccctggagctgggtgtgagggacaggggcctccagctcctgcatcacacagaccactccactggccctggtgatatattggaattcccctttgattttacttggggaaagactttgacagctaaagcaaggtttgaaaaccacagcactccaagatcttcatgtgctacccagcatcacatatcctctgataccaagataaagctataagatagctttatatctgtaggattcctggagtccctcattcagccaaagttctaattaataccaccctgggttgtgaagagtggtattacttagaaccctgctagcaaggtttaaaaatatacaggttttcctaatctctggttggaatcccagccacggtttaagtccatgatgaggatgctgacagagttgaggatagtgcaaattttgtatctactcacctctctgatgaccacaatttactttcttcctctcttttctacagaaaacatttaagtgcaaaggaagtgcagcccatgagatgatccaacttggagcatttcctctttttaggctgggcataactgcacctccctttcctatcccatccccattagtctcagcaatggatggaaaatgtgcccagtcccagcccactgcttcccttttccacttcttggaaacctccccaggacccaatgcccactctgcagattttggatctcatctcataattctttgacaataattctgccaaggaattctctctcttctccctaattctttacatcctataaaataacatcatgatttagtttaaaaaattaagtaaagcagccaaaggagcagagaggcctagaaaatcccagaaacctccaactcttgccctctaacatgaaggtctccccagctcttctgtgctgactgccaccatgagttcccaggtgtttgctgaaccaggtaaggcctctctctcctttcaggaaagttaaccttcaggacaatctgatcaataagggccctcagaatgtcactgcaataagggtcttcagaatttaggggaaattttttttccctaaaaaatgggaatatgtttcaagagaaaccagattggtacaagctggaactggaattctaggccaccgaagccagtctctgggctcttcccaggacaccagtttggggaacaggtctactctattgtatagctctgagattttcaagagaacattttgtttataaaattaggcagttggtccggcatagtggctcacacctgtaatccaccattttaggagcccaaggcgggtggattacttgagcccaggagtttgagaccagcctgggcaacatggcacagccctctctctataaaaaacacaaaaagtagccaggtatggtgacacacacctgtattcccagctactcaggaagctgaggtgggaggattgcttgagccaggagattgaggctgcagtgtgctgtgaacatgccactgcattccagcctggggaaaaaagtgagaccttctaccaagaccagttcagtcatggaggccccaacccagcggtgctagaggaattgaagataaagacacagaaatagagtgcaaagtgggatcagggggctaacagtcttcagagctgagagccacgaacagagtttgatctacatatttattgacagtaagccagtgatacacattgtttgtataggttatagattagctaaaagcattccttaggggaaacaaagaattcttagcaaggagtagagaaataggctctggctgattatccgcagcaaaaacatgttaaggcgcaggccgctcatgctattgcttgtggtttgagcagtttcccgctccagatgggccaggcattccttgccctgctccagtaaaccaacaacttctagcagtgtgcatcatagccatcatgagcatgtcacatttttgcagaaatcctgtttatggccagtttctttaaggcctgtttatgacaggcttaggtctggttgccagcaaccttctctaataaagtataaataacaaaataaaattgggtagttatattttctttctgaaaaagatgaagctggaagaatgaagctgggggtgagggcatggctttaggaagtggaggtcatgatcccatcgaatggcttttgacttggctggtctccatgcaggttgaagacagacaagactgccctggcactgtgattctagtccctaattccaacctcctgggaccaaggactgtggtcacttgttcagcgtcagcccacagccatttccttcctctcctgcccaccacaccttctttcctaccaggggagctttcccacccaatctatagcaatagcctctgaaatgttctccctggctgcagtcagtcccattcaacctatcatgaactccagaggaacaccaatggtgaattgaaacatcagaggaagagcaggtggcaatagattcagtggtcaggttacacttctcagtgaagaagaggcataagcaggacctctcttaaatgatggggtgagatcaaaggagaggttcgactgaactaatttagggtggacagaagagtaggcaagaagcagaactcttgtctggctggaatttggtccagaaataggaaaaacattttaaaaacttagaatgcaagcttggagctacattttggagggtcttgaatgtcaacatggacagtcgggttcagttctgaatgtcataggaagacaatgaaggtgtgtgaattagtggggaagagacgcaaactaatcagaagtatgcatgatgaagacagagcttctggctgcctgaggatggaatgtggaaaggaggacctgagagcaggtatccgcaataatccaggcaagaagggatggtagaggtggaggagaggcagcagctcataggaagaatggggtcagctggagcttactgaagatatttcgtcaagaggacacagtgggaggcctagggacccagctcctagaactcactaccaaaatatcacaaggcagtattgagagacatgcctaccctgagccccaagttcacgtccctctctcactagccctgtaagccccaaccgcagagcttttaaaacatggattcaaaaagacagggcctcctcttcctggatgacccctaagattcaactgcagtctatgagtttggccagctcctttttccaaacggggatccatttgtatgaaaattagctataattttacctcctcaccaacagtaaagaccaatagcagggccaatacctgccagtcttggggagagaatgatagattctgtagaaagcagagcactcagaagcatggagcactagaaaatctcaccctgtgaagcaggagacattgatgctgattgcaggagtggcactgactccctgagcattgtggaatatcaaattctccttctgggcctcagttttcctctccattaaatggggataatgctgtgttacaggcagcaagtgaaggaatctggcagatgatctcacatgttttcctagccccaggaactatgtcttggcaaacatcaccacatgcactggctagagaagagttggaaaggaaagtatttcaaatctgtcttcatgtaccagccaggacctggattactgtgaacccactcctttctcaggcattgcctgcttagacacagatttttcattaaggccccccatccccacccccaaattcaacaaaagtcctgggagcaattagcaaccagacaacttcattcgtcctcatgccagatcaagtagttctgtatacttcccctgccaccaagatctcatctccaaataccaatcaggagtgaactctaaaactctaaccaagtgtagaagcacacagtgagttggaataaaaaaaaaaactaaaatatcaccatatgcattgatactcagaagaccctctggcactcagcaaggcttgggcaggaggcggtggaaaatggtaaatgctgtatgtctctatgttgaagaagttctcaggctgtttttcctccaattcccatagcatgaacctgtaaactcaaagaattggagatgttggggcctctaatagagcagtttccagtagggaccagcaaccagacaggaatgcattgcacatctttgagcattgcatcctcagctctttctttaggctgtgtgtcaggtaaatctgtgcaaatcattttttcttccatgaaacccagcttaccttttgcactagactgatggtttccaaactgagtatgaatcagaatcaccaggactacccctgaaaatgcagatttcctggccttatcccaagattctgagtcaggacattgggttgtggaacagtgcccccatcaggatttcaaccagttttcctggggatacagaggtatagctcagtatagcactggaacaccaatgctctctgaggttcctttgttctctcacatttgagttcggaccccacggctttgaacttgcatggcagtctttggaatgacctgcccaagtcctgtgtggcctctcacttcttctccagtcctggattgccataaaccagctgtgcgacctgctgtgacttcatctctccctcttagtgtctctttccattacttctatgacttttgtgatctctgaataaatctgagatgaagatgaagaatgtagccattctccagaacttgcgatttgcagaacattcttctacctgaccctgctatgttccttgggaatcacttaagacagagaacagcttccattgcaggagatttgtttcttttccaatgctaattgatccctgtcttctactagcttatggtctagaccatggtctcaccattcaccacctcctaaattatgagcacgtttttgcatccgctttagataatggctaactaggaaggagttagagaaaaggaggagagagagaaagggcagaatggccacctccccagggaatgcattctggctgctggaacaaacaactgcaggaattgggcagtcttaagtttcattttagtttttcacgctaaggtttttgaaatccacattaaaaccaaaaccaaaggaagggaaattgcaaaacacagggactttccaactgcaggctctgaaccatctgcagaacatgagcatggtgtctctgggtatgtgtcatacctgggatctttctcctattctttctggggtccagagcatcctgcacctctggctgatgtgaagatcctggggtctcttgcttccctgtttccgggagactctttttatttccttatttacagcacaggcattcctgaaggtccatctctatcacatgtcttcatctgaatgcatgaagacaattaagggagtccttcttcaatagtccacatcctgggtctctgtttagcatcctctgatcactatattctcactatcaatatctataacaatgagtttattaaatacttaccatatgctaacacctcacttttcaatgcccttttcctgtgtcaactagtttaattcacacctattttgctgataggaaaacagtggcacagagacctgaaataagctttcaaaacatctaagcatccaaatcctggcaatctggctacagagtccattgttttaaccactatcctgcctgtcctacagctaaacagcaaagaacacttctctgctgattcctaatgccctaagtgtccaagtctcagattggactcatttcaagatgataatcaatcataggaaaataaaattgagaggaacacagataatctcctagcccacgaatggccaacatgtcccagagctgggctcctccctgatcctgtactgatggagaatatcagtaaagaatcacatcactatttctcatggccgacataaggcctcattatcttttccaataaacctctcgagttgacacttgcattgaaaacctatttgacatccttgatcttgtatatccccacatttgatacacgaagcaggtggacctaaaaatatctaaataggttccatggctactaagcaggcaagctgggattaggcacttggcgtacacgccctgcattctactaacccactttgctttctcataattgacttttaccactattttcatttcttagctctgaatgcacctttgtgtcaagccacatcactggagaatgaaaattttctgagtttatttttgtgtgacacttgccatgcatgtggactggggatttatataaactcaatttataaagaaaacttgactctgtatcagtgttatatgaggcaattggcagggacagtcccagatgcttttgtgtaagagtgtaagttccctcttgtgagaggaaatcctgaggttagggatatgtttcaagttctggaacttcagtattgttaaaagatgatccagagttttttaaaaaagaaattagataaacaagaggtagaagatttaaggtctcttataaataaatttaaaaaaataattgaactcctgagctaagaagactaccagataattcaccagataaaaacataaaccattgaacatgtacacaaaaataccaaccagtagacacaaatttaaacaagctcatactggaatagtttctttctgctaacttttaaattgaggcattggtttcctacaataaagttcaaagaagttaaatcacttttacatacatatgccccaggaatcaccatccaaatcaatatttgcagaacatttctaaaccccaaagtctccctcacattccctgccagtcaataccccacaacatctagtctcaatgctaccactataggttagttttgcctatatacaaaataatactttttattaacaaagtagcatatactttcagttaataatgtattacttttctatttctgcattaataaattaccacaaaattagtggtttaaacaatataaatgtattatgttataattctggagttcagaagctgaacataggcctcagcaggctaaaaccaaggtattatcaggaatgtgtttctgtctagaagttctagggaaggatccattttttcgattgctctgggcattggcagaattcagttcctttgggttattggtttattgagcctaaatgttcattttcctgatggctgtcagacaagagattttcccagcttctagacgcctctgtattctgtggcccagagcccccttctccattttcaaagtcagcaacagtgggtcaagtccctttcatactatgcatttcttcttcttccatctcctctctctgttgagactcagaaaagagtctccactttcaaggactcaaggtattagattgagcatacctggataatctctccatctcaaggtctgtaccctggatcccatccacaaagatccttagtgtgaaaagtgaaaatgaaacttaggactgcccaaatcctgtagctgtttggtccagcaacctgaactcattccccagagagatggccattctgccttttcgctcactccttttctctaactccttcccagttagccattatctaaaggagatatgataaaaaactcaccccctcatccctggtaacagagtcacaggttccagggatcagggagtgaacttttaggggttacttatttattgagacagagtctcactctgtcgtccaggcaggagtgcagtggtgcgccctcagcaacctccatctcctgggttcaagcaattcccctgcctcagcctcccaagtagctgggattataggcatgtgccaccatggccggctagtttttgtatttttagtagaggcagggtttcaccatgttgccaggctggtctcgaactcctgacctcaagtgatccacccgcctcgacctcccaaagtgctgggattacagatgtgagccaccgtgcctagccaaaggggtcctttattcgcctactacaactaataaatgttgtcctgagtaaaaactttatggaaagcgatatggcaatatctactaaagcttcacatttcaacagcagtaaagacatgggggagaatttttaaacttgggttttcaaaataatgttaattaaaattatttttaaatgaaaatataaattatatatgcctaatcataaagaaatgctttaattatgtatgacatttttataatgaagcagtatgaagccactaaattcaaccaattgaagaatatttaatgacttgagagagtgcatgactcattaagtgaaaaaagctgtaaatatgatcataagtacattatgtccatatatgtgtgtatttatatacatgtgtatatgtatatgtttgtatatttatatatacatacctatgtacatatatatgcacacatatgtatatacacacagatatacacacagagtgagatggagagagaagaaagggagaaaatacataaatagagcagccagatccaatcttagtgtttaaagcacagatagagtgaccaactgtcctgatttgcccagaactgagaggtttcctgggacactggactttcattgctaccgagaaagtccaggctgaagcagaatgaactgattaccctaaatgcagatacatttttgtcctttcctttagggaacaatatattttatgttttctaaaagaaaaatgcaaccatttaaaatttattacaagttcttcaggtacctcattctgtgttgggggcaatgccagacacatttcagaagctgttcttagcaacagcacacatcctggaaatgcttcagataagtgatggaagtgtagtatcctccaccaatgaaatagaaacctcttgacttttgaaggtagattcttgaagaaacagtatttctgcagttcgcagcagccacatgtcagttaaaaaagactttatctcctttagttatgtatgattagaccaatctcagaaatttgaatgggaaaagcaatgaaatttaaaaccacaaagctggagttgggcacagtagtgagtgcctgtaatcccagcactttgggaggctgaggcaggaggatcacttgagcccaggagttcgagaccagtcagggcaacatagcgagactccgtctctaaaattaattaattaattaaaaccacacagctaaaattgggctacttggaagcttcaagttgcaatttcttcttgaagatccctcttgtgggagtgactctggcatggactctgcaggcaaatgttggaggcacatgtgggagcaggcaccacactgcagccgtccatcgctacatgccaatgttggcaggtgccttgagagagatgttttacgttttttttttaactagttcatgtagtctaaaacacactaatgtttattatactgacctaaagactctgcagttgacttcatattgtactttcttatctttaacaacatcgaatagaaatgaactgctgattttcacacaaagaaaatgaaacactatttggctcagaatgctattatggagtaaaatacatattaatcatattaataaatcaagtagactacttggtttcagtttttaaaaaacagtgatacaaacaaaaccgactattttgtatgtgatgtggaacatttatttgtgcaatgactccttcacagtgcctaacagatattaacctagaggctgttagccttgatgagcttaattgtgatcttaataaataatgaagtaaaaataccaccctgagtaccaattaacaccttgtcattgagggctttataataatttcccaatttattgagttgatgtgaataacttgtggaatcattaacactattctctgacatttagataaaagtcaattgtgggtttggtttttatgtcgacaaaattaatatgttttatttagaatgctgtggagtgcactaaatattatgaaatattttagacccatcaccctgcctcaagttaaagtaaaagacatttttgataaatgagttggactatttaaatgtgaagtatgagaaattgcttagccaagaacgtcataaggctcaaaggttactaagctgacatggataacatggaacatctggtagtgattagagacgtctgatatttccagttcttcctcttccgtgcacagggcagggttgtacttccaggccatcttgaaaaccgacaacctgtgtgatccactttgggcaataaaatgtaagcagaagtggcatatgtccttccaggcagatacatttaagagctaggacaagagtctccatgtctctttcacctgccagtgaccaggagtggtccagtgataaagactccagcagcccaaataaggagaaagtagactggtgagaaaactcttgaaatctggataagaggcagcccacattatgctgtgtcaaaccgtaccacactgttccaggcattacagtcaaaaccaggagccctgagaagagcttggcctggacaaccagacccctgggtgctctgtttcacctctagcatatcaattccctaatctcatcctcagctgctccatcaataaagttgagatgataatctgtatatttaggaaatgaggggattcaacagacaaattccattttcacccctagtccttaaatgtgtgtcttggaccacatcaccatggccaccagcaaagacagagcgggggaagacagtaaccagaatctacactaccaagcaagccagtgacccagcattatgcaatatttgcccaaataaccagcagggcaggccaggagacttctacgcacatcccgatagcaccccgaaagccccaggggcaactggacagttcactgtcatcaagacaatttcttagttctcataataaaacagttctgcccacctctcctccttacacctagccacatacccaaacctcattcaagagtttatcctaaaattccaattgattccagggagttacaaaggacaagaatagacatccctgtacagtttattggggttcagaagttcccctgtgccaagcaaatattaggcattgagtggggactggtgatacaaaagcttgaaatagtaaattccgtgttcccaagtctgaatggaatctgttcatgctcctttgttgagacatgttaagtaaccctccttgaaattattcatctgttttccagctgggcccaggattgcttatccttgcaacatgaacttacagagacaaaaaaataaagattctggagcctccattacaatgaagactctaccaggtaccagggaccaaacgagatagtccactgtgtaacagggcatggtgaccccgtcgctgaattctggttttgattctttactaaattgtcaaagtgactttggggaaatcattttcccactctgtgcctcagtttatacatctgtaaatgaggcatttgaactagattaatgactcccaaaatggctttggttaaaaattacctggtcacctagaccacttcagaaatagagaattcggggtttcatctctgaagattctgactctgtattttggtgtaggttaaggcatctcttctgcattattaataattgccccaggcatctggatattccaggaggcaggtctgaaaagaccagtgcactggagagtctctgaggtttctagacacctcactgtaggttttctgcatggttcttgccctctaattggaattccatgatggcttctgttctgacattcccacttgccagtgctagcttgtcatgaagtagccgcacaacctacaataaatcatttcacttctgttgttgtttcatttgtaaagggaaatacttgaataaattaaatgcaactgcctctttcaactcattctataatattgtgatcattaaggacagttggagcagagctgaaaaatgaaagcagaaattctgcttcccaggatgctctcccacctaatttcactccttgagaaccaggtaagaatctagaaggtctggttccatagcaaggtatatatttcctgcccttcattcacagaccgttgtttctgatctcaggctctgctccattagccactgagccacagacatatttgttctatatgtcctatttcacatagttgtgaagtccaccttaggaaactgctcatgaggaagccaccgaagagaaaagaaacaggaaaggcagaaggaccacttctctgaacaacacagccaggccactggacagaacagctgctgaatttgcatgccctaagtttcgttttaactttttacataaggatttctcaaattcagtttaaaaacaagagagggaaattgcgtaatgaaagcggcttgccaactgagattcctaaactccctgcagaattagaattctgatgccccttggcatctgttagcactgggatctgacttccattccctctgagttcccagagccatctagtattttggttcatggcaggatcccaggatctcactttgctcccgttcctgggagacacttttttttccttcatccacagcacaaatattccccaaggtccatccctataacacatctatatccacttatcttctggacactacacccaccttacttaactattgattacagttagtttattgatcacctaccatatgctactcactcttcaaagcaagttttgggtatcagataatattcataaaatgcataaaaataaatatcaatttccgcacaagaaaattaaagaataggtaggaaattggaatataaagaagttaaataacctaagccttctctgacaaatatattaaccagtgttcccagtatccaaatgaagacttttaaccatcatgctattctgcctgtctattttaggactgacagccaggaacacttctctgacatttcctagcatctgagcctctctgctctttgatttgattatttgcagacaatcacaggtgaatcaagttagagaagagcttaagtactatttaattctggaataggttacatagatggtaccactccttattactgtactaatagcagacatcactaatcaatcacagcattatattcacggtaatgcctcattgttttagttttacaacaaaactttctagtcatctatcaccaattcataaagttggcacatgatcaaaaactacttgtcatcccaaaacctgtcaaaaccccatacttcatagatgaggatagtgaatctcaaagtcaataagacttgcccaaggccactttgggcaggttattggtgaaatcaagactagactcaagttccttgacacttaattcccttcatttttactagccttttttgattcccaataattataattttcatgactatttctgttgtctgtgcatggatgcacttttcgtttgaagtcagctcagaggaaaattaacaaagtcctcagggtattacataagacaatggctttattgctgcttggaaaatacacacaaactccacccctaaaccaatacccccaccccatgcacacactcagattgatgctacacagtacacctggcagagaaccatcccctaaaatgattaaaaagctgccatcctgaaacaactcaatttcctttctgattaaaggaaatccaaatgacacacatgttccatatactgcaaattctttactgttaaaagttcacatagtaattgtaataaatgaaaaatgcatgaggtaaatgtttaaaaatctcttctgaatcaaaacagtaaaaacccacctgatttaagaacaggagcatattaaccacaagaaaaaaataaagcaactaacatacatattcaaaagcaaataaagtaaaatgtaagcaaaataatggtgagccttttgcttcgatttactttatttcgaagtataattcaatatactgtccagtaaagtgcaggcattttaaatgtagagtttcatgaattttacatgtgtagttaaccatttaactacctctctgatcaaaatcagagagggaagcttccaaaagtttccctcatgatgtccatacctgcaaaggaaccactgttctaacctctatcactgtacgtttcttttgtcttttaacaagaaaaatatcttcttcttagcaactataaaatgtttttaagaataatacactcacatttaagtgaaggggcaaattttccagcaatgtgttcatttgattaaaagtcttaataatatccacatattttgatttattaattctttggctagaaaattaaacgaagacattaataataatgttatatcagcttttccacaagtattgtgtaaaaccataaaaatggaaatggtatgattcccaactatggagaagtaaattcttaagttaattatggtgcactgatatatatgaactcctatagagcttttaaagttcaagattattggggaatatttactgtcttgtgagaaatctaaacacactaattgaaaaggcagtattcaatcttggatttggtggtgaaattttagatatacaccctatagttcaacaatacattgccaattactaaccgatgttatttctataaaacaatgagaattcctgaggaacaaattttgtaattgccccctctcctcccttcctaattcattctgagtccagaatgaccctaacatcaaaaccagataaagacattacaacaaaagaaaactataaaccaacagaaatctataaaccaaactcatgaacaaaattctcaacaaaatatcagcaaataaaatccgacaacatataaaaagaattataagctacaaccaagtggaatttattccaggtatgcaaggctgatccagcgttcaaaaattggttgatataacccatcatatcaactttctaaagaaggaaaatcttattataatatcaatagatggaaaattttttttgacacaattcaacagccattcatgatttaaaaaaaaaaactctcagcaaactaggaatagagggatacttcctcagctttatagagtgcattaaaaaagacctacagcaaatatcatacttaatggtgagaaactagatatttttctcctaagattgagtataaggcaaggatgtttcttctcaccactccaattcaacataatactggaaggcctagccaacacaacagcacaagacaagaaaataaaaatatatacagattagaaagaataaataaaactgaatttatttgcagaagacatgattgtctgtgtagaaaattacagagaatcagcaacaaaaaaaagtcatgccactaataagcaattttagctacaggatacaaggctaatagataaaattcaataacttcctgtatatcagcaatgagcaactagaatttgaaattaatacacaatactatttacattaacaccaataaaatgaagtgtttagaaattagtctaagatgtacaatatatatgagggaaactacaaacttctgatgaaagattaaagacgatctaaataaatgaagagatattccacatgtatggataggtggagttaatgttgtcagcatgtcagttcttcccaacttgatctgtaccttcaacacaatcccagtccaaatcccagcaggttctttttggatgtgatagactgattttaatgtttatatggaaaggttaaagatctagaatagctaacacagtactgaaaaagaatagtcagaggactaacattacccaacttcaagatttactattaggaaacagtaatcaagacggtgtggtattggtgaaagaatagacaaatggatcaatggaacagaatagagagccctcaacagatgaatggatacataaaatgtactatatacatacaagggaatattactcagccttaaggatatgtagcatatcatatgctgccacatagatgaaccctgagatccttacgctaaatgacataagccagtcacaaaagaaaaatactatatgatttcactcacatgaggtagttagagcagtcaaaatcagaaacagtaagtagaaatggtggttgccaggggcttgggggaggggaaactggagatcaataggtatagaatttctgtttacagatgaaaagagttattgagactgttgcacaacagtgtgaatgttcttaatgccactaaactatgcacttaaaaatggttaagatggtatgtgcatttttaccacaataaaaataataaatgaataaagaacaaaggaagtaattagctatcaaaccacaacaaggcacggagaaaccttaaatgcatattgcttagtgaaagaagccagtctgaaaaggctgcctactatatgattccaactatgcatatgatacttgggaaaagacaagctcacagagatagtaaaaagatcagtggtagccagagatttgtggagaggaaaaaggatgaatagaagaatacagtgaattcttagagcaggaaaacttctatatgatattgtaatgatggatagatcaggcctgcagggggagtagatgaggtcagtcttttgcaaacctggttccttcttgccacgccccgcccacagccccactgtgtgtgaaccaagagagttggaaggccttctgcagacggacccattccacctgaatctccatgacatattggacttctccatataatttcatttggaaagaaacttgagcatctaaataaaatgtttggaaaccaccatgctacaagaccagcatgtgctgtctagttcttaccctctgcaacagtaagattctggggcattaagacttagttccaggattctgtcattctgccaacgttctgtggctggggttctaaaggagcttgcctggcttagaactgcaagtgactctagtgtgatggagagcaccagcaaagccttagggcccatccctggcctcctgttacccacagaggggtaggcccttggctctcttccactatgacgtcagcttccattcttcctttcttatagacaattttccatttcaaggaaatcagagcccttaatagttcagtgaggtcactttgctgagcacaatcccatacccttcagcctctgctccacagagcctaagcaaaagatagaaactcacaacttccttgttttgttatctggaaattatcccaggatctggtgcttactcagcatattcaaggaaggtcttacttcattcttccttgattgtgaccatgcccaggctctctgctccctataaaaggcaggcagagccaccgaggagcagagaggttgagaacaacccagaaaccttcacctctcatgctgaagctcacacccttgccctccaagatgaaggtttctgcagcgcttctgtgcctgctgctcatggcagccactttcagccctcagggacttgctcagccaggtaagacctctccctttttaaggggagaccaaaagaggaattaagaagagccattatgtcacagctcattaggaacaaaaccagaactaaaggctcaggtcactgaggctggttcccttgatctttcctgaccccagttttgggaggagacagtggagccgctacagcaacaaccctcccattgtttggggaaataatccagaacgaagaactgtttctcactgtgggtgtaaaggacatttcaggccgtagtggagagggagaaactattgcctgaagcttcaaattttggttatggttcagtgtaccttccagaacagtggctgtgtaaagaggatgaggacccagaggaatctcagcgtatggcataggctaactctaaagcccatgaggatgaaagactgggaagcaaggtattggaacttatgttcccagtgtcagaagttttgggttagtagacaaggactagcttgttactcaaaatgtttccaaacccagtcaacaatgacgggccgcagagttcaatagaggaaagagactcacaggcaacattttatctctgggatctggactaagacactgaacttgggatggtgacttcttggtcttctccttccttctcttcttttccttacaaatgcacacttacggtgggtcctaaatgtctcattctttgcaaaatttctttcagattcagtttccattccaatcacctgctgctttaacgtgatcaataggaaaattcctatccagaggctggagagctacacaagaatcaccaacatccaatgtcccaaggaagctgtgatgtgagtggacagtgcctggcacccccattcaaaagttctgatggacaacatagagaagtcaagattcatgtccatatgagtcggatgcatataacttctatccaaagggcccctctaccccatagagaaactcagtccatgagaaggagtccataactgctctaggattcccttctaggggcttggtgaaactaacccaatatctgtagccaggaccctggagggtttcacctggacagcaagagcagagcttccttctggagcttcttcctcccactcttcccctccctcctctcccgggtccgggtccttcacctaaggaccaagggctgatcagttctagggaccaatggcccacagtcctgtgcaggatcttcaaagtcttccatctaattgtgccctctctcccccacagcttcaagaccaaacggggcaaggaggtctgtgctgaccccaaggagagatgggtcagggattccatgaagcatctggaccaaatatttcaaaatctgaagccatgagccttcatacatggactgagagtcagagcttgaagaaaagcttatttattttccccaacctcccccaggtgcagtgtgacattattttattataacatccacaaagagattatttttaaataatttaaagcataatatttcttaaaaagtatttaattatatttaagttgttgatgttttaactctatctgtcatacatcctagtgaatgtaaaatgcaaaatcctggtgatgtgttttttgtttttgttttcctgtgagctcaactaagttcacggcaaaatgtcattgttctccctcctacctgtctgtagtgttgtggggtcctcccatggatcatcaaggtgaaacactttggtattctttggcaatcagtgctcctgtaagtcaaatgtgtgctttgtactgctgttgttgaaattgatgttactgtatataactatggaattttgaaaaaaaatttcaaaaagaaaaaaatatatataatttaaaactacttagtcttattcttcttggggtaacatttagctgggagtgagttttgggcatcatgggtgacagtttgggcatggacgggccatttttcaagaatgtcttctggctacgctggactcaaccaaggttctcagagaacttggtgggaccaggccaggatgttccagctctctgactctagtccctaacttcagcagccctgattcgctagcctctcttgtttctcttgtttatatattatccagcctaaggtattttgttatagctgcccaaaaagactaagataatctccatcactctacccccaaccccaatcccaagaacttgcaagcatccatttaaaggcgtggaacctcttctttttgacagccttttaaggtcaagattcccctgtacttagtgagcttagctgaatcttcttacaaacatgtgacccgccatattgagccatacataccagagcttattatttttccagcttattgggaaaacacgtctaaggcaaacaaatttattgtactgttgaaccaactctgcagggcctactgttaatgttcatgtaaaggtgccacaattccagtatatttggaagtatagagaggaaagagatttgggttctgctcctaagagtaaccttaactctcttggtcacttagggtgacataatttttcccttcagcattaagatgccccatccaaaaatcaggatcatactgtgtcacaggcaggaagtgagaggatctagcagatgactacacaagtccctccagctctagagccatgtctcttagaaacaaggtcatgtttgttgtctggggtagagtggggacataaagttcctgggattaaagccataaaggcagccagggcctagcttattggaaaaacacatctaagtcagataccccttatttggagacaagctttccattaaagttcaaagtagtacacccacagttccaagagcaataaagcagctaagtgtcagatggactagaggggcacctcccaggcagggtccacaaaaaagctccatcaaactctaagctctttcttcaatagcttcaaggtcaattgggcacagatatgtgggtcctgggcttcatgaaatcctggaccacaaatcccaaattctaaaggcaagaacactcacacaaaactgacaccaggccacagcaaaaagacacaaatttgttcttctcaaattttacccagcttcactttgggattatgtcattatatttcaaatgacaatgagcataatacaccttaagtaacatgtcatcttatttaagtggttgatgttttatgtgccctgacttgaatatatgtgttttaaaaatccacatccttccataaactggttcagatctgtaagccctgctttgctgtcttgtaaactgggggaaagacctggaaaggtcactcaaagctgacatacaacctcaggctcacctcagtttcaccctcagctaaggctgaccatttgtggcagtccatgactcacttgattcactcaatatctgctttctgcctcttctcacttctcacttgctgcccccaggcttctcctgggtgtcatcttgggtcaggagttgactccactgcacacttgtccaagtttcagaagtgtggaagagtgaacattttgggtggtaaccgtccacagtgaagggtgaaggcagatgttcaaatgcttctgccatcccttttaccagttctgctctgatcttggttatttcttttcttctgctggggttggatttggtttgttcttgtttctctagttccttaaggtgtgacattagattgtctattaatgctctttcagactttttcttttaaatataggcatttaatgctatgagctttcctcttagtaccgtttttgctgtatcccaaaggttttgataggttgtgtcattatcattgttccgttcaaagatttaaaaaattttcatcttgatttcattgttgacccaacaatcattcaggaatacattatttaatttccatatatttgcatggttttgaggtttccttttggagttgatttccaattttattccactttggtctgagagagtacttgatataatttcaattttcttaaatttgttgagacttgttttgtggcctatcataatgtctatcttggagaatgttccatgtgctgatgaatagaatgtatactctgcagttgttgggtagaatggtctgtaaatatcccttaagtccatttgctctagggtatagtttaagtccattgtttctttgttgactttctgtcttgatgacctgtctagtgctgccattggagtattgaagtcccccactattattgtgttgctatctcatttcttaggtctagtagtaattgttttatagatttgggagctccagtgttaggtgcatatatatttaggactgatattttcctgttggactagtccttttatcattatataatgtctctttttgtcttttttaattgctgttccttcaaaatttgttttgtctgatataaaaatagctactcctgctcatttttggtgtccatttgtatggaatatcttcttccacccctctatcttaagctcatgtgagtcctaatgtgtcaggtgagtcccctgaaaacagcagatacttggtgaattcttatccattctgccattctgtatttttgaagtggagcatttaggctatttacattcaatgttagtattgagatgtgaggtactactctattcataataccatttgttgcctgaatacctttttttcattgtgttattgttttctaagtcctgtgagatttatgctttcaggagattctagtttggtgtattttgtggatttgtttcaagatttagagctccttttagcagttcttgtagtgccggctcggcggtggcaaattctctctgcatttgtttgtctggaaaagactatcttgccttcatttatgaagcttagttttgctggatacaaaattcttggctgataattgttttgtttaagggggctaaatatagaaccccaattccttctagcttgtagggttcctgctaagaaatctgctgttaatctgataggttttcttttataggttacctggtacttttgcctcacagctcttaagagtctttccttcctcttgactttagataatctgatgactacttgccaaggtgatggtctttttacaatgaatttcccaggtgttctttgagcttcttttatttggatgtctgaatctctagcaagtctgaggaagttttcctcaaatatgttttctaaacatatttggggaacatatttctaaacattccctcaaatatgttttctaaacttttagatttctcttcttccttgggaacaccaataattcttagatttggtcgtttaacataatctcaagcttcttagaggctatattcattttttaaattcttttttcttcacctttgttggattggtttaattcaaaagccttgtcttcaagctctgaagttctttcttctgcttgtttgattctactgctgagactttccagcacattttgcatttctctaactgtgtccttcatttccagaagttgtgattgtgatttatttatgctatctatttcactggagatttttccattcatatgctgtatctttttttttatttctttaagtaggacttcacctttctctggtgcctccttgattagcttaataattgaccttatgaattctttttctggcaattcagagatttcatcttggtttggatccattgctggtgagctagtgtgatcttttgggggtgttgaagagccttgttttgtcatattaccagaactgtttttctggttccttctcatttgggtaggctgtgtcagagggaagatacaggactcaaggactgctgttcagattattttgtcccacggagtgttcccttgatttggtgctctttcctctccccaaggatgaggcttcctgacagccaaactgtagtgcttgttatttctcttctgtatctagccacccagcagagctactgggctctgggctggtactggagggtgtctgcaaagagtcctgtgatgtgatctgtcttcaggtctctcagccatggataccagtacctgctccagtggaggtagcatgggagtgaagtggactctgtgagtgttcttggttgtatttttgttaagtgcctaattcattgttttatacagttaatatttctttcccttctctttggtcaatacctggatctcaaaaggcaagctcactagagtcagggccaggaactcagttgggtacttggttggtgtgttctccagggttggggataagactaggactggggacttacccagcatgatctttggagccaggactggggctgacattgcagactcagtcgacgtgcttggtaggtttgggttcaagaggacagcccacaaatcaggagcaacagggctggggccaagttagccacataactaggagtatgaagacacaaaaatggattgagcaaataatggaaatggaaatgtatcaaagataatggaagtcaagtcactcaatgttgaagaagcttctataaaaaatacagaaagttggagggaaaaaaaataaagcaaaacaacaacaacaacaaaaaactctgggatgttggcctggaattggaggtgaactcactgttcattaacttattagaggtaaactcatggttttaaatatagataggtagatggaaggaaggaaagaagaaaggaaggaaggaagaaaggaaatggtgattagtgggaacacataaacataggtatactagttatgtttactgagaaagcctagaaagaatgacacatggggtggtaatgtgcgcttcagtgcccagtttataaatactatcctccactatagaaacaagagctcctgggataagtggctgactccagaattagaatattctatcgtgtcaaagagaaagggattactcaaagaaagatggagacgtgtcaaaaacatttaaaaaccaatctgggctgggtacagtggctcatggccaggcttggtggctcatgtctgtaatcccagcaacttagaaggccaaggcgggaggatcacttgaggccaggggttcaagaccagcctggccaacatggtgaaaccccatctgtactaaaaaactacaaaaagtagatgggtatggtggtgcatgcatgtagtcccagctattgaggaggctaaggcaggagtatcgcttgaacccgggaggcagaggctatagtgagccgagatcgtgccacttcactccagcctgggtgacagagtaagactccgactcaaaaaaaaaaaaaaaaaagagccaacctgaagagtctcacactggccaatttgggacaatttgataaccaaaataaatacattttttattacaaaataatttattttagcccattgaataaaatcaaagaagataaagttttatcgtagaataaaatgctaaccaatgcatatagatggaatggtgaagttagaaaatcaccaacttctaaccatcagagtaaaaattgattcaggcaagaatcatctatggatactaaaactcatgggtgaaaatttaactattgacatagcctcaaagtatctccccacaacataattaataacatgaattaataagtacaaaacacttattaattaacatatataattaagagaagagaagagacttgacaacattttaaccaagtaataaaagctaacatcaccagtaatggggcaaatcagcctgaatatctcctgataatggtgcactgagaaggacacagcattacttcaattactttcctgctaaaaatacatcaactgaatctaatcaggagaaaatatcaggcaaatcaaattgagggagattctgctaagtaactgatcttactgtcaaggtcacaaaatataaggaaagactgagcaactatttcatattgatggaaactaaagagacatgacagctaaatgcaacatgatcttggattggaccatgaacctgtaaaggatatgattaggacaatgaaaaaagccttaatgaaatatttggatcagatggtgacattaaactgatgttaatttcctgatttcatatttttaatgccgttgttctgtagcagagtatctttgtttttaggaaatatactgaactattaaggtataattaggcattctgtctacagtctaatctcaaacggttcaagacacaaaacactccctttaaagatagagagatagatcattctatatcacatatttatgtgtgtgtatgtttgtaagtgtgtgtgcgtgtgtgtgggggggggcgtgtaacaccagatgctccacatctggtattgcaacacttggtattgttgttcttttaaaaaagctggccgtgcagccataaaaaaggatgagttcatgtcctttgcagagacatggatgaagctggaaactatcattctcagcaaactaacacaggaacagaaaaccaaactctgcatgttctcactcataagtgggagctgaacaatgagtacacatggacacagcgaggggaacatcacacaccagggcctgttggtgggtggtgggctaggggagggatagcattaggagaaatacctaatgtagatgacgggttgatgggtgcagcaaaccaccatggcacatgtatacctatgtaacaaacctgcatgttctgcacatgtatcctagaacttaaggtatatttttaaaaaagctagccattattattatgtgcatggttccatctcatacggtttcaaattgcatttcactcatgaataatgaggttgagcacctgttcaaatgtttggtggctatcctgttttataaagttcaaggccatgtcttttgtcatttttatttgggattgtctgtcttttcattatgaattagaagtattttcgacattccagattggaaccctttgtcaggcataagaattgaaatatcttctcataatctgtgatttgactgtgtactcccttaaagatgctttttgattaaaaaaaacaagttcacaattttaatatagtccatttatcatgttccttcatggtttatacttttgttttctgtttaagaaaactttttaaaacctaatgtcattaaggtattctcttatgatattttctagaaacttcatttctttttctgttcacatttagagctacaatctacctggaattaatttttgtgtatgctgaaagataggaaagataggaatcaagattatattttttcctataaatatctgattcctataaatatctttactaactaatcaaagcacacgagttatttaaaagactatttttcctaacttctttagaatgcaaactttgttataaatctgatgtccatatacgtatgattccacttctgtaccctctaatctgttcccttggtatattttctattcttggagtaatggcacatgttttaatgactacaactttataataagtgttaatatctggtagtataagttctacatctttgttctttatgattgtcttgatgatttttggctttgtatttctccttatataaagtttagaataagcttatcaatttccatgaaatacttgcttggattttaattgagattacattgcatttgtgggggaattgacaacttgattattcagagtcttccaattcgtgtgcatgccatatccctctgcttattcaagtctcttgatttctcttagtaatgcttagtagtttccgaggtattgcacgtgtcttgtcagatttattcttaggtattaaggtttttataaactattggaaatcgtgtcacttatgaaatgtcatctcttaatgttagttacatgtaaaagtaaaatcaatttttgtattattaatgagcaattgtgctaaattcactcaattatttatagcttatgtgtagactcagatgttttttatgaaacccatgtttcatgccaaaatatgacagctttattccatcctttacaatcatgataatttcatttcagattcttatatctcatttactaggacctccagtgcaatgttgaataaaagtggacagctcttgtctcagtcctgctctcaaagggaagttttcaatattctactatgaagcgttatgcttgctggaggtattttgtatatgctgtttatcaaattaaggaagtttcctgtatttgttagtttgcttagggttttttttttcttttagctttgaaatggctttgaaactcaataaatgattttttaattcaaatgatcatatgatttttctacttcattttataattgtgataaaatacattcattggtttttccaattttaaaacaagctaatattttaaaaatcaaaccaacctagttacaatgtatcattttttcaggtattactggattccatttgctattatttaattcaggactgttacatctatgctcatgaaagatactgccctataatttttctttcttgaaagtccttctcagggtttggcctcaacattataatgattttatcaaataaactggactgtgtttcttgtttaattattgtctgaatatatttttataagaattcatgtttttgcttcctttagtacttagaagtaaagcattctggaatttacctgtcaaaagtttttaattacagattccactaattactagaattgaaatattaaaatgttctatctttcttggttctctttaataaattgtgtttttctcacattttatccatttcataaaattttaaaatatatctatctgaagttgttcactttttttattattttgtaacatctgtagtctctgtaataatgtcttccttttgatctctgatgttgctaaattggaacttttcacttttgattccttggtcagtcttgcaaagggattaacattttattaatcttttcaaagagcaaactttttgcattggcatttttcttcattgcatgtttattttatgttttcattaatttctgcttttattttttttgttccattttttggatttgattttctaccttttttctaattcttgagaaaaatacctagatgactgattttaagtttttctttttaatacatgcatttaattctatgaatctctgtctttttcattgggtaaaaccactttattaactgatcaaagtacttcattttgtttcctgattcgaggttcaaccattaaacacagttcacaagaaaatacaatgattacttaactaactgcaattacaagagttagaaatctccctagttgttcacataatacttgtacaaattcacacaatcgtgtggaccacttaagcttagtgtgaaccaaaagagcaaaccatagtcatggctagagttttgtaataacagaagagtaattgttaccttatgaatatactttaaaaatcacttggctagtaattgtactgtttcctcattgctctggggtgtgtatgaaggctcttaggagagcaaacatctatttctgttctgtatgcctctctctcatttcaaactgtgtaaaataactattgccccaccatgaacattggggattggaaagatagtcctacaatcttcttcataggttttggcttttaggcaagccggctggttttctccaaagctttcttttgaatcttcagatactattttaatcctaaatgtagattactgtgtttgtgagggtatctaagtgaccatgtgatggcaaggacaacaaagtagtccaggaacacagtaagtgagtgtgtgtgtgtttgtgtgtgtgtgtgtttccaactgagcccggctttgagatttcattttgttagttgacagctctttaatcaataccaaagactctggaacactgcagatttgctatggaggtagataaaacaaatcaggcagttaagtcaattgagaaaaaaagggattttccatctttagataatatcacgactaacagttgattctttattcttggtgcacatttaacatttctacctattttgggaaatattcaagtcttcttctttttttttttttttattgttcattcttgggtgtttctcgcagagggggatttggcagggtcataggacactagtggagggaaggtcagcagataagggtcttcttacctgtctctcagaacaaacacatttaaattcagcttgtattaactacagataaaagaaaaaaacagtattaacatttgtatgacagcactgccgttcactttctggatttgtgacacacaaacatcatgcattctaagacagaagttaattttatcagtgtcactagtgttgttaattttaaaagatacagcaagttcaaagcttttccaaaaattgaaatcaccatgttttaagacagactggaatgttacaaatgattctgtaaaataatcatttttctgtacattctcatcttttggttcttccttatctgaatccacagtgggtacctcccatccttcagcagtttatccaggtgagaatacttgaatgtgaactgagaggcccagtcactcagggtctcctcctgggcaggagggaggtcagaaaggtcatcatgcttgtcctgcagtgctcccttatccaggcaaaatgtggcagggcccctggatgtatctctttcggcaaagatcctgtgtggccccctggcccttggaacttgcaacctctggtcacgctgaacactttgcccttgctggtgtggccatgagaatgtgcaggtcctaaaccccattgaagtgctgcagctcggcaagggagaagttgtacctgttgccaccacatctttggcagcaaagtttaggccaggctaggcagggctctggagctccctgctttctcctccctctcaatgagtgagttgccgctatgaatctcttttttttttttgagacggagtttcactctgttgcccaggctggagtgcaattgtgcgatctcagctcactgcaacctccacttcctggcttcaagcgattctcctgcctcagcctcccgagtagctgggattacaggcggccaccaccacgcccggctatttttgtattgttagtagaaacagggtttcaccacgttggccaggctggtctcgaactcctgacctcaggtgatccacccgccttggcctctcaaagtgctgggattacaagcgtgagtcactgcaaccggtcgccactatgaatctcttaaacacagcttttaaagctcacacattttaatatgacacattttcatcataatttacctcaaaatatattctcatttccattgtgatttcttctttgatctatgagttatttagacaaaattgactaaagttttaagctttgagatattataaaaataaatcattttattgttggtgttaatttaattccataatggttaaagaacacattctatgtgttcaaaccttttctatttttgagattagctttgtagtccaacatagagagtcagtttgataaatgttccacgtgtatttgaaaaaatgtatatgctgaagttgttggttacagacatgtcaactaagtaaattttgcttgtagtgtttttctactctaatgacattttcagaaaaaaaaatgaaagctgaatgaatttgttactagaataacaatatttcactatgagaaaatctgaagggaaatgattccagtggaaacacagatcttcaggaagtaaacaacagcactgtaaatgatcaggagcaagacaagaagcatctcctattccttttcaacattgttctcaacgtcctaggcagtgcaataaggtaagataaaaagaaacagagacataaggattagaaagaaagaacttaaaatgtcatatacaggtaacatgattatatacataggaaatacaaggagatctacaaaaactactagaatgaagtgaatttctcaagatcacaggaattaagctaatatacaaaaatcacttgaatttctatatactaataagaaattagaaattaaagttttaaaaatccatctattgtatcatcaaaaatagaataagaataagaataaatttaacaaaagatgtgtaagacctctatactgaaaactaccacacatactcaagggaaaatgaagaaggacctaaataaatgaagagctatataccacatttatggagcagaaggctcgataatgttaagctgtcaatttaggatggagctggaggccattatctttagcaagctaacacagagacagaaaaccaaatactgcatgttctcacttataagtggaagctaaatgatgagaagacatggtcacatgcagggaaacaacacacactggggcctttcagagggaggatctgaaagatcctacccacactgggcggagggagaggatcaggaaaaataactaatgggtactaggcttaatgcctgtgtgacaaaataatctgtacaacaaactcccatgacagaagtttacctatgtaacaaacctgcacttgtatccctgaacttaaaagtttaaaaaaagtcaatataatcccaattaagtccccatggtcttttttttcttaattttttccaactgttattttaggttcaaggggtacatgtgtagatttgttacatgggtaaattgcatgtcgtggatgtctggtgtacagattattttgtcacccgagtaatgaacatattaatcagtcgttaattcttcaaatttcaccttcctcctacccttgacccccaaatagtccctggtgtctattgttcccttctttgtgttcatgtgtactcaatgttttcctcccacttataagagagaacaagcagtctttagttttctgtttctgtaccaatttgcttaaaataatgacctccagctccatctatgttgcctcaaagaatacgattttataccttttaatggctgtatagtactccgtgatgtatatgtaccaaattttctttttaaaaaaattttatttaactttaagttctgggatacatgtgtggaatgtgcaggtttgttacataggtttacacgtgccatggtggtttgctatgcctatcaacctgtcatctaggtttgaatccctgcatgcattaggtatttgtcctaatgctccccctccccttgtcccccacccctgataggccctggtgtgagatatcccctccctgtgtccatgtgttctcattgttcaactcccacttatgagtgagaacattcagtgtttggttttctgtttctgtgttagtttgctaagaatgatggcttccaccttcatccatgtccctgcaaaagacatgaactcattctttttttatggctgcatagtactccatggtgtatatgtgccacaatttctttatccagtctatcattgatgggcatttggcttgcttccaaatcttggccatttcaaatagtgctccaataagcatacatgtgcatgtgtcttaacagtagaatgatttataatcctttgggtatatacacagtaatggaattgctggatcaaatggtatttctggttctaaatccttgaggaattgccacactgtcttccacaatggtggaactaatttacactcccaccaacagtgtaaaagtgttcctatttctccacatcctttccagcatctgttgcttcctgactttttaataatcacccttctaactggtgtgagatggtatctcattgtggttttgatttgcatttctctaatgaccagaggtgatgagctttttttttttatgtgtttgttgactgcataaatgtcttcttttgaaaagcatctgttcatatccttaacccactttttgatgggttttttttttgtaaatttgtttaagttccttgtagattctggatattagacctttgtcagatgggtagattgcaaaatttttctaccattctgtaggctgcctgttcacactgatgatagtttcttttgccgtgcagaagctctttagtttgattagatcccatgtgtcaattttggcctttgttgcaattgcttttggtgtattagtctttaagtctttgcctatgcctatatcatgaatggtattgcctaggttttcttctagggtttttatggtttggggttttacatttaagtctttaagccatcttgagttaatttttgtataaggtataaggaagggatccagtttcagttttatgcatatggctagccagttttcccagcatcatttattaaacagggaatcctttctccactgcctgtttttgtcagatttgttgaagattagatggttgtagatgtgcagtgttatttctgagacctctgttctgttccattggtctatatatctgttttttgtaccggtaccatgctgttttggttactgtggccttgtagtgtagtttgaagtcaggtagcatgatgcctccagctttgttctttttgcttaggattgtcttggctatatgggctcttttttgattccacatgaaatttaaagtagttttttctaattctgtgaataaagtcaatggtaatttaatgggaatagcaaagaatctataaattactttgggcagtatggccattttcatgatattgattcttcctatcagtgagcatggaatgttttcccatttgtttgaatcctctcttacttccttgagcagtggtttgcagttcttgaaaaggtcctttatgtcccttgtaagttgtaacgttgtattgctaggtattttattctctttgtagcaattgtgagtgggaatccactcatgatttgactccctgcttgcctattgttggtatataggaatgcttgtgatttttgcccattgattttatgtcctgagactgctgaagttgcttatcagcttaaggagtttttgagctgagataatggggttttctaagtatacaatcatgttatctgcaaacagagacaattttacttgctctctttctattttaatactttttatttctctctcttgcctaattgccctggccagaacttccaataagatgttgagtaggagtggtgagagagagaatgcttgtcttgtgctggttttcaaagggaatgcttccagcttttgcccattcagtatgacattggctatgggtttgtcataaatagctcttattattttgagatatgttctatcaacgcctagtttattgagagtttttaccatgaagggatattgaattttattgaaggccttttctgcatctattcagataatcatgtggtttttgttactggttctgtttatgtgatggattacatttattgatttgcatatgttgaaccagccttgcatctcagggatgaagctgacttgatcgtggtggataagctttttgatgtgctgctggatttggtttgccggtattttatggaggattttcacgttgacattcatcagggatattgcccttaaattttcttcttttggtgtgtctttgacgcattttggtataaggatgatgctggcctcataaaatgagttagggaggaatccccctttttctattgtttggaatagtttcagaaggaatgttaccagctcctccttgtacatctggtagaatttggctgtgaatccatttgttcttgggctttttttggttggtaggctcttaattactgcctcaatttcagaacttgttattggtctattcaggcattcaacatcttcctggtttagtcttgggagggtgtatgtgtccaggaatttacacatttcttctagattttctttttttttaattacaatttatttttattttttatttttgagacagagtctccctttgttgcccaggctggagtgaagtggcatgatcttggctcactgcaacctccgacccccaggttcaagtgattctcctgcctcagcttcctgagcagctgggattattggcgcccactaccacacccggctaaatttttttgtattttcagtagagatagggtttcaccatgttggccatgttggtctcaaactcctgacctcaagggatccacccaccttggcctcccagagtgctaggattacaggcgtgagccaccataccttgtctcttctagattttctagtttatttgcatagaggtgtttataatattctctgattatagtttctatttctgtgggatcagtgttgatatcccctttatcattttttcattatcacattttccttattttgtccactgttgataggcatctaggttaattccacatctttaatattgtaagaagtgctgtgatgaacatgtgtgcatgtgtttatggtagaatgatttgtattcctttgggtatatacccgttaatgggattgctgggtcaaattgtagttctgttttaagttctatgagaaatctgcaaactgctttccacagtggctggatgagtttacattcccagcagcagtgcataagcattcttttcttcacaaccttgtcatcatctgatatttttttgactttttaataatagccattctcagtgatgtgagatagtatctcactgtggttttaatttgcatttctctgatgattagtgatgttgaacattttttcatatgcttgttggccacatgtatgtcttcttttgaaagacatctattcatgttttttgcccattttaatgggttgttttatgctttttaatttaagttccctatagattctgcacattagacccttgttgaatgcctagtttgcaaatattttctcccagagaacaaagactgtctgtttactcagagatgatcatatggttttgttgataatttcttttgctatgcagaagctctttggtttaattaggttcacttgtaaatttttgtttttgtggcaattactttcggagactttgtcataaaatctctgccagggcctatgttcagaatgatatttcctaagttttcttctagggtttttataattttaggttttacattgaagtctttaattcatcttgagctgttttttgtgtatggtgaaaggaaaaagtccagcatacaccttctgtatatggctagccagttatcgcagcaccatttattgaatagggagccctttccccattgcttgctattgtcgacttcgttgaagatcagatggttgcaggtggacagttttatttctgggttctctaacctgttccattggtctatgtgtctgtttttatatcgttgccatgctgttttgttttgtttgttgtagccttgtagtataatttgaaggctggtaatgtgatgcctccagctttgttttttgtttgttttttgtttgtttgtttgcttaggattgctttgattattcaagctctttttttttggttccatatgaattttataattctttttctaattttctgaaaaatatcatgtgtattttgataggaataccttttaatgtgtaaatttccttggggagtatggcattgtaacaatattgattcttcctatccgtgagcgtggaatgtttttccatttgtttgcattacttctgatttatttcagcagtattatgtaattcttgttgtagaaatcttcacctccctggttcgctgcattcctaggtattttattcttttttgtggctgttgtgaatgtgattgcattctcaatttggctatcagcttgaacattattaatgtataaaaattgctactgatttctgtacacttatcttgtatcccaaaactttgctgaactggttatcagatctaagaggctttgggcagagaatatgcagttttctaggtgtggaatcatatcgcctgtgagtagagatagtttgatttcctcttcttatttgaatactttctatttcttccttttgcctgatcgctcaggctaacacttccagtactatgttgactaggagtggtgagtgtgaacacccttgtcttattccagttctcaagggagatgcttcttgcttttgcctgttttgtttgatcttatctgtgggtttgtcaaagaaggctcttattattttgaagtatgttcctttgatgactagtttgttaaggtttttaacatgaaggagtgttggattttattgaaagcctttcctgcatctattgagatgatcatgtggtttttgtttttagttatgtttatgtgatgaatcacatgtattgatttgcatatctttaaaccaacctttcatcccaggaataaagtcttcttgattatagtgaattagctttttcatgtgctgctggattcaaattgctagtattttgttgaggatttttgaatttatgttcatcaggaatattggcgtgaggtttttgttgtttttttttgtgtctctgccaggttttggtatcagaatgatgctggcgggggagaaatcagttagggaagagtccctcctccttaatttttgggaatagttttattaggattggtaccagctctttatacatttgatagaatttgactgtgaatccatctggtctgggttttttttggttggttggtttttttaactgattccattttgaaactcattattggtctgttcagggattcagcttcttcctggttcagtcttggaaggttgtatgtttccaggaatttattcatttattctaggtttcctagtttgtgtgcgtgaagtgttcataatagtctttgagggttttttttgtatttctgtggggtcaatgataatgtcctctttgtcatttctgattgtgtttatttagatcttccttctttttttctttattagtctagctattgtctgtcaatcttatttattctttcaaagaaccaccttttggttttgtttatcttttgcatggtttctcatgtctccatttcattcagttcagctttgcttttggttatttcttttcttctgctagttttggggttggtttgctcttgtttttctagttcttctagatgtgatgtcaagttgttaatttgagatctttctcacttttttatgtggttatttagccctataaacttccctcttaacactgccttagctgtgccccagagattctggtgcaatgtatctttgttttcattagattcaaataatttcttgatttcttccttaatttctggtttacacaaaagtcattcagaccgagattatttaatttccatgtaattatatggttttaagagctcttcttggtattgatttctatttattgtactgtggtctgagagtgtgattggtatgatttcgattttctttgatttgttgagaattgcttcatggttaagcatggtgtcgattttagagtatgtgccatgagcggatgagaagaatgtctattctattgttgttgggtattctatagatttctgttaggttcatttcatcaagtgtcaagtttaggtctcaaatatcataattagttttctgcctcgattatgtctaacactgttagtggggttttgaagtctcccattattattatgtagccatctaagtgtctttgtaggtctctaagaacctgttttatgaattttagtgctccagtgttgggggcacatatatttaggatagttaagtcttcttggtgaattgaaccctttatcattatgtgatgccattttttgccctttttgatcattgttggtttaaagtctatttgtctgaaataagaatagcaaccccgcttttttattttctgttttcttgacaaatttttcgccatccatttaatttgatcctgagggtgtcactgaatgtgagagatgggtctcttgaacacagtatacagtgggtcttgcttctttatccaacttgccattctgtatcttttaagtggggtgtttagcccatttacattcaaggttaatattgatatgtgcagatttgatcatgttatcaccttgttagctgattgctatgcagacttgactgtagagttgctttataatgtcaatggtctatgtgctttgtgttttttgccacagtcttttttatagagaaattgatatgtatgtgaaaaggacctagaatagccaaaacaatctttaaaacaataaaatagaaggatgggcactaccagatttcaagacttcctataaggtgataattattaggatagtataatataggcataaggatagacaaacagatcaatagagcaaagtagagagttcagaaatatacatatatatgtatgtatgtatctaactatatatagattaggtatctattgatagataaataaatggatctgtattagtcgtgactcttcagagaaatagaacatatacatacatacacacacatatgtatttatctatctatctatctatatatatatagagagagagagagagagagaggttgattgattgattgtaaggaattggctcacagaattatgaaggctgacatgtctcaggatctacagaatgagtcaggaagatggagaccaggagaaccaatgaagtggctccagtcaaaacccaaagacctgagaaccatgagaattgatgggtagttccactgcaaaggccagctggctagacacctaggaagagctattgtttcagtttcagtccaaaaggatggaaaaagctgatgtcccagtccataggaagtcaggcaaaataattctctctaactcaagtgagggtcagcctttttgtttaattcaagccttcaactgattggacgaggcccactcacattagaggaaacaatctactttacaccgtctacctatttaaatgttaatctcatccaaaacactctcatagaaatacccagaatattgtttgaccaaatattagggcactccatggcccagtcaagctgacacataaaagtaaccataactataagtacacacccagacacattcacatattgatttcatttttaagaaagtcatcaatccaatgaagaaataaaaagtcttccaaataaattatgctggagcaaccagatatctgtatgaaaaaaaaataagtttctcccttacctcacactatagacaaaaattaatttaagatggatgatatacctaaatacaaaagctaaagctagaaaacacctagaagaaagcgtaggagagtatccttacaacttgtggcagaaaacctgtcttttttaagcaaaacagaacacataaccttacacttttagaaacgtatatattagactttatcaatattgaaaataattactcatcagaagatactatgaagaatgtaaaaagataagttaaagattaggagaaaatatattgtattacatagaaaatactttaattcagactggatagtaaattttaaaaattaataacagaaacagaaaacaacccaaataaaaataggaaaaaaaatgtgaacaggaagtcctaaccagagcagtcaggcaacagaaagaaataaagggcatccaaactggaaaaacggaagccaaaccaattctgtttgccaatgatataatggtatatgtagaaaaccctaaagattccttcaaaatactcctagatttgataaatgaattcagtaaagtcttaggttacaaaatcaatctgcacatcagtagcactgctatacaccaacaacaaccaagctgagaatcaaataaagaactgagtcccttttacaatagctgcaaaaataaagtaaaatatctaggaatatacttaactaaggaagtgaaagatctctatgaggagcactacaaaacactgctgaaataaatcatagatgactcaaaaaaacgaaaatacatctgatgctaatggattggaaaaatcaatactgtgaaaatgatcatactgcccaaagcaatatacagattcaatccaattcttatcaaaatactaacttcatttttcacaggattagaagaaactattctaaaattcacatggaaccaaaaaagagcaaattctaagcaaaaggtacaaaccaagaggtattgcactgacttcaaattatactacagggccatagtaaccaaaacagcatggtactggtgtaaaagtagatactgagaccaatggaatagaatagagaacccagaaataaagacaaatacttaaaaccaaatgatctttgaaaaagcatacaaaaacatgcattgaggaaaggacactctattcaataaatggtgctgggaaaatttgatagctacatgtagaagaatgaaactgaatccctatttctcagcatatacaaaaatcaactcaagatggactaaagatttaaatctaagattgaaatcataaaaattctagaagaaaagccaggaaaaacccttccggatattggcctatgcaaagaattcatggttgagaccacaaaagcaaatgtaacaaaaacaaaaataaaagaaatgggacctaattgaactaaacagctgctgcatagcaaaagaaataattatcagagtaaacagacaacccacagaacgggagaaaatatttgcaaactctgcattcaacaaagggctaatatccaggatcttcaaggaattcaaacaaatcagtagataatattaataataatcatcccagttaaaagtgagcaaatgtcatgaatagagagttctcaaaagaagatagataaacggccaagaaatatgaaaagaatgttcaacatcactaatcatcaggtaaatgcaagttaaaaccacaaagagataccaccttacctcagccagaatggccattattaaaaagttaaaaaacaataaatgttgacatggatgtggtaagaagggaacacttgcacactgctagtaggaatgtagattagtacaacctctatggaaaacagtatggtgatttctcaaagaactaaaagtagatctatcacttgatccagcaatcccactactgagtatctacccaaaggaaaagaagtcattatatcaaaagatccttgcatgcatatgtttatcgcaaaacaattcacaattacaaagatatggaaccaacctaagtggccagcaacctataaatggataaagaagatttgatatatatcaccatggaataccactcagctatataaaaaagaatgaaatatcttcttttgcagcaatttggatggaaacggaagtaactcagaaatggaaaaccaaatgctatatgttctcactcataagtgggaactaagctatgggtatgcaaagacatacagagtggtataatagacattggagattcagaagggggaagggtggaaggagggtgagggatagaaaagtacatattgggtaaaatgtacactaatgggtgcactaaaatttcagacatcaccgccatacaattcatccatgtaatcaaaaaccacttgtacccctaaagctattgaggtttttttagaaaaaatgtgaacagtcgtttcacaaaaaatattcaaataaccaataaaaatataaaaaggagctgaacatcacaagtcatcaagaaaaggcaattgaatacctaataaaacactactacaacccattaaaatggctacaatagggaagattgataataccatgtattgatggaaatatagagcaaaaggaaatctgatatgttgctggaggaaagtttgcaaaactgtttagtgctttgtgataaaagtaaacatatgtttacccaatgacccagaaatcccacttctaagtaagtatttcaatcaatgtattcctatatgcataaaaagattggaacaacagtgttcatcacaactttattcataacagcagaaaactagaagcatttcaaagatctaggagaatggataaagtgtggcgtattcatcaaatggaatattacctagcaataaacacaacaaaaaactgacatttttttaaaattacattgagcagctggagtgcagtggcgtgatctcggctcactgcaacctctgcctcctgggttcaagtgattttcctgcctcagcctcccaagtagcagactacaggcgcacaccatcacacccagcaattttggtatttttagtagagatggggtttcaccatgttggccaggctgctctcgaactcctggcctcaggtgatccgcctgcctcagcctcccaaagtgctgggattgaaggcatgagccaccgcgcctggcctgtaataacttcataaccatagtaaagttattttagagctctctttgaaggaaacacattttgattgattaaatatctgaaacttcagaaagcctacatttttcttccttaaccatgtgacattagtgtgagtggaaaccaagagtataaagctaagccctatgtactaaagaaataacataagttaacctattactaccacatcttacatttggatttaaatacgaaaaacacaacacagaaaacagaaactttttttttttaattaagatcataaataggtcattgttgtcacaacacatttcagaattttaaaaaaacaaacattttggctttctaagaaaaaagactttaaaaaaaaagtcaattccctcatcactgaaaggacttgtacatttttaaacttccagtctcctaaggcacagtatttaatcaggatgccaatattaccaccctgctgtagcaggaataagaggcaaggtattagcaccaagaaaaacagcaaaatttctggacaaaatcatctgtcattaaaaaacaagagagagaaaaagatagactaagtggtaagcattttaatgaagaaggtccagtgttgttattcagtactttctgttaaaaaaaaaaaaaaaaagaaatcgaagtattttaactcaagtaggtttaattcaccacaaaagagctatgagaaaagagagggggttggtaaaatacagtatactttctttaaaaaggacttgggaggaaaaaaatcagcttagaagatcatatgaaagggcaaacatcgcatggaacccagttagtgtcctagtttattactagtcttcagacagatccagaaaatagagtaagatactaggtgttatgtctacctagtatcttactctattttctggatgtctgaagactagtaataaactaggacgagttaatgggtgcagcaaaccaacatggcacatgtatacatatgtaacaaacctgcacgttgtgcacatgtaccctaaaacttaaagtataaaaaaaaatttcactgagcataagacttcagacacaaaagagtgcatgccatataattccatttatgtgaatttcaagaacaatcagtgatgacagaagtcaaagtagtggtcacctctggaaggtgggacattgaccaataaatatttcttatgtgtatcatagcatcaagcatcacttattgtcccagtaaaatagactaaatgccaaatagcactgtatggtcatagataagttctagttctcccatttaacggaacactattcaatcattaagaaattcagttatggacatatgtaaaatgacttttgacatagcattaactaacaaacggagaccaacatttatccagtaaaattcctaatatgctcacatggaaagaaaaaaagaacaacagaaattttactgtgattctgtgtcaacattgagtgtacatgttgttttataatatttttatgatttttgagatatacttttcaagagttctaagtcatcgtacattatttttaaaaacataaatgtgtttctacaaaacgctgctccaacagaaaagcttctgcttctttgcttattcttagtaccagcatgtgctgaatacacggttgttcctgttggcattttccacttggtcatgggaaggggcagctccaggcaacccccctcggagttccccagaaggaaagggcagcagaagctagaaatgtaaacaactaaaatgatgatgcaacaactggtaagatgcgaagtccccactggagaggaagatggtacacctcaatttgtctgggacaaccctggtttattcctgtctggcttgcaagataaagtatataatagttctcatacagaggagagcccttatggcttcttagacactcatatcataagtaagtattcatttttgactgtgtgcttgtccagagaatgcccagaaaagggactggattttctagagtagaagcagtaaagcttgccctgggaggtgaccaacaatttatttcagatttggcctcctttgacatctgtgtagtttgagaagtcttcataaatgagacatgatttataccaggtctcaaatgattcctgtttgggaaggaattacgggttgatggaatattataagcaatgcatatagtgatggatataagaactgcaggtggtatgaaggaagaagtaaggaagtggtcttgtaatgttttcatgggcaatgcatgggtttttctcccccagcataccaatggatgtctcctcttctgcaggcttgcctttctggagagattcagccctggaggctgaacatattgattagtgctggcttcctccccttttcagtagccactccagcagttagacatgtttcctataaaatgaaaaatttgcaccatcgtggtgctcctcagagccttaacaagtgaaatgagataaacagggaaaagtaaaggcacaaggtgccccagctctgcttccctgagcagttttggttttaatctgttacgtcagaacttaccaataagttactccttgagaatagactttagaaggtaaacaaatatctgaaaaccacaacattacatacatttgccaacactattatgttactctctaagattgtgggcactaagattgcctagtactatagtgggcaagatggcaggatgcttgggttctaagattctacagcaacataatgattctaaaataacaggattctatagatcttggagacttctgttatataaagattattgggttgggaaacagctggctgaacttctactctagacataactgcattactaacataggaccttcgaaagttctcactctgattggtgaaccagggtagattttcaggtcttcataggacatcatccattcagaaccatcagcaaataatcccagaaggtctctatttctttccccagtacagagtctccctgatttatggcagcaggttcttctggaaaaggcatggaagaagatttatagtattagacctatgagttgccagattaagcaaaaatattgcaagaggtatatctatgcttaaaaagaaaaatcactccctgtttatttgcaagtcacatttaactaactgccctgtatttcatctggcaatccagcattgcagggcccttcctcaaaaagacctggcctacccatccatcaggagacttcaggtctataaactggcttagatctgataactgggtaagagatatgagcatactagctttctgcccactagaattttctaccttaaagtcaagaagcaccttagtaagcatctcatctatttcatttctagggattccatagtcttagctacaaatccctgccaatcaaagcactcagattccaactctggacctgtggcttcttggggtaattgtgtccaccctgtctccgctgtttaataaacattgctgcctggcttttgttgctcctggaacccatttctctcactgagatcagcaaccccagtctcattgcagcagtgattctccaagagtggtcctcagacaagccttatcggtatcacctgagaacttgttagaaatacacaattttggcactgttctaagaactctccatgcattatcttattgactctcccaacatcgtaatgagatagcgattaccaatcagtttcctcatggaggttcagagagggaagtaatttgctctgaatcacataaccagtaaacgatggatataaaacttgaacccatgcttaactgaccccagttcccaggctcacattctcctatgtcgtattaagtcctgaatcacaggaaaggacagacaggagattttacagctgggaagatttgaatgtcctctcactcatccagtttataggaaagtttggggcatatgtgtgtgagtcaattttaagagtgttagactgagaaaaataacatatagggttcaatcgcccaaattcagaatttaatgtactggcacaagtacctggaagggatattaatggtcagctagattggctaattgaagtctagacttaaaaagaagtctaagagaaggaagcagagcaagatggctgaataaaagtctccactgatcatcctccctgcaggaacaccaaattggacacctatctacacacaaaaagcaccttcataagaaccaaacttaggtaagtaatcacagtacctggctgtaactttgtatcactgaaagaggcactgaagagagttggaaagacaatcttaaattgccaacaccacccctcccctatctcttggcagtggctgcatggagcggaaagaaaatgtgggcggggggagggaaagtgcagtgattgggtgacttgcactggaactctgtgctgccaacactgggcagaactcaaccagcgcccacaaagggagcatttagacctgccctggccagagaagaattatctgtgccaggagttggaatgttaattctggcaagccttgccaccatgggctaaattgctctggctaaattgttctaaataaacttggaaggcagtctaggccacaaagactgcacttactaggcaagttctagtgctgtgaactggtgggcaacacgcaacctagtgagacatcagctggggcagccaagggagtgcttatgttacgcttcccccaaccccatgtgtcacagcttgcagctctgaaagagaccccttcttttcacttgaaaagagaggtattaaaaaaaaaaaaaaactttgtcttacaagttggatgctaaatagctcagccacagtaggaagccacagtaaggcactggggagggttgtgaggctcccattccagggcgtagctccaggatatttccagatacaccctggagctgaaaggaatccactaccttgaagggaaggacccagtcctggcaggattcattacctgttgactaaagagccccggggagctgaataaccagcagccataatcaggtagcacatgctataggccttgggtgagactctgagacatactggcttcaggtgtgacccggcacattcccagatatgatagctacaagaacaggcccccttgcttgagaaaaacagagagaggagtaaagaggactttgtcttgaacttagcagctcaactacagtagagaagagcaccaagtgggcattggggtcccccgttccaggccttggctcttgtacagcatctctggacctaccttgggccagaggggagcccactgccctaaagagtgagtcccaggcctggcagcattcaccacaagctgaccaaagagcccttaggccttaagtgaacattggaggtaccctggcagtactccttatggacctgtggtggtggtggtgaacatgaggagagactcctctacatagggaaggggaaggaaaggatggaaaaaacttcattttgtggcttgggtgccagctcagccacagtggaacagagcaacaggtatattactaaggtttctgactccagaccctggctcctggacagtatctctggacctgcctaaggcctggaagaatttgctgcccttaagggaaggacataagcctggttggttttaccacatgctaattgtagagccctagggccttgagtgaacatagccagtagtcagctagtggttccagttggtgctgcttttaggtccaacccagttcagtcccagtagtggtgaccatgggggtagttgtgtaacctctcttccagctccaggcatctcagcacagagagagataatctgtttgtttgggacaaagtaagaaaaaagaacaagagtttctgcctggtagtccagagaattcttctggattttatccaagaccaccaaagtggtacacagaaaaccacagaataacattgtaattgtggtgtgtaaactatgcataagttacgtagaaagacaaaaagatgaactgatccaaatatctgcaacaacttttgaagacatagatagtacaataaaatataaacagaaacaacagaaagttaaaaagtggggagatgaagttaaaatgtagaagttttatcagttttctctttgtttgtttatgtaatcagcattaaattgtaatcaatttttttaaaatgggttataagacactatctgcaaccctcatggtaacctcaaatctaaaaacacacaacagatacacaaaaaataaaaagcaagaaattaaatcataccactagagaaaataatcttcaccaaaaggaagataggaaggaaggaaggaaagaaagaagagaagaccacaaaacaaccagaaaacaaataacaaaatggcaggagtaagtccttacttattaataataacattaaatgtaaacagactaaagtctccaatcaaaagacgtaaaacgtggctaaaaggatgaaggagcaagacctgatgatccgttgcctacaagaaacacacttcacctataaaggcacacaaagactgaaaacaaaagggatgcaaagagatactccaagcaaatgaaaaccaaaaaagagcaggagtggctatactaatatcagacaaaataaatttcaagacaaaaaccataaaaaaagagacagagggagttattatatagtgataaaggggtcaatttaacaagaagatataacaattataaatatataggcacccaacactagagcacccagatatataaagccaatatcattagagctaaagagagagatagactccaacaggataacagctggataatttaacaccccactttcagaccctgaaacagatcatccagacagaaaatcaacataggaacatcagacttaatctgcactatagaccaattggatctactagatatttacaaaacatttaatccaacagctgcaaaatacacatttttctcctcagcacatagatcattctcaaggatatatcagatgttaagccacaaaacaagtcttaaaacattcaaaaaattgaaatagtatcaagtatattctctgaacacaatggaataaaactagaagtcaataacaagaggaattttggaaactccacaaacacatggaatgtaaacaatatgctcctgaacaactggttggtcaatgaagagattaaaagggaaactgaaaaatttcttgaaacaaattatgatggaaacacaatataccaaaagctatgggttacagcaaaagcagttctaagaggttaatttatatagctctaagtgcctacatcaaaaaagaagcaaaccttcaaataaacaacctgaaaataaacgcttgaagcaatggatatcccatttactttgatgtagttattacacattacatgactgcatcaaaatatctcatgtaacccataaaaatacacacctattatgtactcacaaaaattaaaaattaaaaaataagaagcctacagttaatgaagttgaaatgccagaaattctctggaatgacaggaaggagtccagagactcagggaagtggatctgttggaatggatctagtctatctgttggatctgttggaatggatctagtctatgtgcaagctgctgggaggcccagggggacactcccttcaatccaggtattaggaaatgttttgatgagttgtgggaggagggcaggatgcttaagagctctgtagtggctattctttatagatcagtgatgacagtgggacatgatataatcccatagttctcaaacttttgtgtatttcaggatcacctaatgggcttgttaaagcagtctgccatgctactactggtggtaattaaagtaatcatgatatgttgacagatcctattcctgtgcccctttccatggtgcacctaaaacatacgagcaatccaatcccagaatcccatttggaagttctattttatggggccaattcaatgtcagtaagtgtcccagcaagaaatagataacacttaaaatggaagacttggagaaaggtttagtaaagaagctatttacaaagatgtaagtgggtgaaaagagaccacaggggtgtttggtaccatgaggctattaagaacatggttagactgcaaaaaatttctccagttctgtaggatatctgttcactctgatgatagtttcttttgctgtacagaagctctttagtttaattatatcccatttgccaatttttgcttttgttgcaattgcttttgacattttcatcatgaaatcttttcctgtgcctatgttttgaatggtattgcctagagtttcttctagggtttttatagttttgggttttacatttaagtctttaatccatcttgatttcatttttgtatgaggtgtaaggaaggggtccagtttcagtgttctgcatacggctagccagttttcccagcaccacttattaaatagggaatcctttctccattgcttatttttgtcaggtttgtcaaagatcagatggttgtagatgtgtagtcttatttctgagatctctattctgttccattggtctgtgtgtctgtttttgtaccagtaccatactgttttggttactgtagccttgtagtatagtttgaagtcaggtagcatgatacctccagctgtgttctttttgtttaagattgtcttggctattccactgcggcctctcagggagtgagggaaagggagagcgtcaggataaatagctaatgtggatggagcttaatacttgggtgaggggttgataggtgcagcaaaccaccatggcacatgtttacctatgtaacagacctgcacatcctgcgcatgtatcccaaaatttaaaataaaataaaaattttttaaaaagaacatggttatattcctaaatctaaaaaggaaaaacaggggatagctcagcaaacctggataggagagtcatggagaaaccaccttgaaagaagttaaaaccattagttgagggatgtatccaggttgaggaacacagggagacaacagaggagaagaacctcaacttaactcttctccctgctctaatgtcctcagaagctcccttgtgcctaaacccagtcagaagctagaaggtcagcaacctcactgatgtaacccaccaagattggcttcctagggcagagaatagaatggaaaagaatggaatgtgtgtctgaagggacaagcttataatatccttttctcaggtgagtcttgacacatttttgtgtcaaagttaggtaggtctcaaaatgaattgagtggtgtacaatcttttgatattctctggaagagattgcacaagattgaaatgaccacttccttcagtgcttggaggaattagctgtttgtgccctttgagcccagagaatgttttgtgggaagattttcaattcctgattccatttctttaatagctttagaatgactttctattttttatttatttgtgcaccctggtcagttagatttttaagaaattcatccatttcctctaaactaaatttttggcataaggttcttatcattttctttttggtgtctgcaggctctgcaactggttatatgtacctttttccttttttcttttctttttttttttttctgggacagagtcctactctgtcactcagactggggtgcagtggtgcaatcttggctcactgtaacctcggcctcccaggttcaagcaattctcctgcctcagcctcccaagtagctgggattacaggcatgtgccaccatgcctgggtaatttttgtattttttttagtaaagacagggttttaccatgttgtccaggctgctctagaactcttgacctcaagtgatccccccgcctcagccccttttttcttttttttttcattttcagttcaggagagttttagcttaattataggctacagaaccagctttgggcttcatctatcctttctaatatttactgtttcctatttctctaatcctagctctttatttcttccctttactttcactgggcttattttgctatagtggaatgcagagggatgagtattccaggaaggcacaaaaactgtgccaagtcttggagctagggatgagtgggaaagggacatgttcaaccattttaagccattccctccccacctcccagctcccagatatgtgcccctcgcaggaggagcccaggaatgggccaaacacctcacttctttgctctgagggccaccccagccctcccatcaacagctctagaaacccaatggtccttcctggaaacacggggcctgcatcaatcagaggtgtttgaaccatgtccctctgggcctgaggggcagaaggggacacaatatgtaatgtaaggagcccctgtcatcagaaatctgacttaatctgtttcagatattagacttccacataaaagttgacttggaaaaagacttctgctgctaaacaaaagttgaaactgccttggtgataaaatataagcagaccagctttctcttctagctttccctctcatttcccataagattttggtcaagttatttaatctctctgcatccgtttcctcttctatgaaatgggcatgataataatggtatgtacctcctcaaactaaatatataacgtgaacagagtccttagcacagcactctttctctacaggagttaattttcattgtttttctctttcctgttggagaaagtaagaagaaaacagctcctttatggcttcccatggtgaatggctggggcgcgtctgtgtccctttctcctctctggctccttgtggcctgaacagccagaaggaagccatgccatgctgtttcagccctcagcttccctcttgcatttcctagaaaagtctttggtgcccagctccagctcagcagattcaggatcccccttcatcatgacttggtcaacgccctgctcaggccaaggtcctctgagagttccaagcttctccactccctataaaaggccggcggaacagccagaggagcagagaggcaaagaaacattgtgaaatctccaactcttaaccttcaacatgaaagtctctgcagtgcttctgtgcctgctgctcatgacagcagctttcaacccccagggacttgctcagccaggtaagtcacctcccttcgactctccctctctttccctctgtttctctattcaaggaagacctaagcccgagtgctcctccactttttttttagattgagtctcattatgttgcccaggctgaagtgcaggggtgcgatcttggctcattgcaaccttcacctcccaggttcaagcgattctcttgcctcagccttctgagtagctgtgattacaggcacccgccatcacgtgcagctaatttttgtatttttagtagagaaggggtttcactatgttggccaggctggtctcaaactcttgacctcaagtgatcctcccgtctcggcctcccaaagtgctgggattacaggcgtgagccaccaggcccagccaagtgccccacttctaagcccaccagaatagtaaggctcctcagaggttcactttaacatctaattttaaagatagaaagctgaagcccatgttggaggcagaagggaccctagccatccacctccaggttattgcagagcaagaatgaaacctaagcttctgactccagatttagggccttttctttgacctcatctgatcgtcccaaactctgcagatctgggaccacacccaggacctttcccactggccttgcccgtggcctcccctagatggctgtgacatgtctccaccatgcagctgagcctttgagatcctgaggcacatgtcacaggtcccacctcacctcagggtctagggtgggagtgctgggcttgggggtgagtaagatctatttcttcctctttgctttgcatcccatacagatgctccctgctgtattcaagctgagaaaagcctaacacatcctcaaagtctttttctttgtaactatttctagatgcactcaacgtcccatctacttgctgcttcacatttagcagtaagaagatctccttgcagaggctgaagagctatgtgatcaccaccagcaggtgtccccagaaggctgtcatgtgggtagaaaaatccctgctcacctggctcctccccactcccacattccccaatccaaagttctgccccaggagacagacgtcagactgacttgagatcttaggatgagatctagccagactgtgtgatgcaaatcctccaattttggctgcacaacaggtccaaagaggacctataatttcccacaccttgtttcctggatgggcaccagcccacaccctttagcagatgccaggatcagtttcccaggggcagcaagagcagtggctgcctccagagaccccttctgtccacacacctcctacttcctgtcctggaggggtgccccttcacctgtagtaggtggaccaggcaggtttagaacccagtgtgtcatctcctgggtaaaccctcaaagggttccatctaactgtgccagatctccttcctccacagcttcagaaccaaactgggcaaggagatctgtgctgacccaaaggagaagtgggtccagaattatatgaaacacctgggccggaaagctcacaccctgaagacttgaactctgctacccctactgaaatcaagctggagtacgtgaaatgacttttccattctcctctggcctcctcttctatgctttggaatacttctaccataattttcaaataggatgcattcggttttgtgattcaaaatgtactatgtgttaagtaatattggctattatttgacttgttgctggtttggagtttatttgagtattgctgatcttttctaaagcaaggccttgagcaagtaggttgctgtctctaagcccccttcccttccactatgagctgctggcagtgggtttgtattcggttcccaggggttgagagcatgcctgtgggagtcatggacatgaagggatgctgcaatgtaggaaggagagctctttgtgaatgtgaggtgttgctaaatatgttattgtggaaagatgaatgcaatagtaggactgctgacattttgcagaaaatacattttatttaaaatctcctacacagtggtgttttcttcaggagtaactgccaaccagtaggggctctcagaggtgtgggtggatggcatgccagtggaaggcagatgtacagaggccctggccatggggctagcctggctcatctgagtttcaaggagggcctgcctcaccagcccaggctgttctggaacaatggctccagtccccagcatgggcgctcctggctcgcaactcatccgtttcatattcagttcatttctttctttaaaaccacactcctgccaaaagtaaacccatccctccccctctagtctcccaccccaatctatgcctccccactccaagcagcaagtgattcagacttcatgtgcacctgacactcagagggaaaccagatgaccaagtcctagtgagcctcaggattggtagggaagagggtgcttgggcctaatggactttagaggatggggaagtatggtcatagcaaagattcttttaggggaggtccaagatagcaatgtggggagagggcctggggggaatatccccaaacggtccgatatgggcttccagaatgtaaaagttggagacatgtagaaatgaaagttgagggcaggttctagaggaattagaatatcagggtggggagtttagactcagttctgaaggcaggaggaaggtgcaaaggtttttgagtcatccagagggaagaatggatgccaggaagactagctattggctgtggataagatggagttgagaagggagggcggaaaacagcctactgcaatagtccaagcaagagaaaataggggctgaagaagggcagtcatgggggtggagaagaggaggcagattaagaagactgggccagatgtgtgacatgttgaatggggaatgagggaaacacagcatgagacctttgccctctaaaagtgatctttaaaggcgtgccaaccccaagacctagaaatacttccttccttggctattcttccttgaatcacacgttgtacaaattgaagcttgtgattgtcccttttaaagcgttggccctcctcttcctatatgtccaccaagggtttatcctgctcttcccaagacagcctcactcctccagataagctgggtgggcatctcaatcagacccagaacctacccatgcctggacacccactgagatcttcctcaagaagagatgggcactgctgacaacagcagggcctgtcccccagatctggtaccacactgcatcaggcagtacacttggcaatgtgggacacctggaggagttgtcctaggaggcaacagctctaggctctaatgccagatctgcccctgaattgctgcatctctctttagccctcagtcacctcatctataaaatgggtttagcaacattttacaggcagacaacctcacatgatcccctccagctagggcagttgtgatttggtgataacatcaccccccaagccctctgggcagggcagggagaagaagagtcctgcacccaaatgtggatccagctgtgaaccccagctttctgttccactgtaccactcctggcagccaaatctggaggcagagaatctgcaccaccaccctgactcaaagcttacaccccaggacaaaggcagtcactgagagctagtgagtcacttattagcccagttcccctggcaccaggtgcaacatgtctccctcctcctgacccatccttcagcccctggctcccacctctcaatgccaatcaagttttcactctgaaatccaagagacccagagggttgggggttgatgattgtataatttaaatgtttaaagtgcaacaacatagcttatcaagaccaagcagatcctctgtgacctagcaaaagcagggcagaaggaatggtgtagggctggtagtttcggggacaggtgaagccatgtggtttccagagcccacaatggaaagaaatctgctcattttctttttgacgggcagtgcctcagcatttttctgtgcctctgaacccatccaactgtgtccaaggcgcaggcctctttgcctctcttcagcttgaatctgtgaacagagaataagagagaaggctgagccacccaagccaccactgggtgggcaacgcacaagccccgcctcctccggctgccaggtcccctaaactgctcttgctaggccttgggctcccctctgtaaatgaagttgctgcacaggatgtgtggtttgcacgctggggaacagccaaagcaccaggagcttatgaattgaatttcctggacccctctcctggtttcaatttggtgtatcagggtggggctgaacagcctgaaaacattctgacgattaggtgagatgagaaattcccatcctggaatagctctttgcaccaactttaatgtttctgtgtccatctggggccttacttgttgcgttggactcatgtgtttgtgtgtgtgtgtgtgcgcgcgccttgtgtgtgtgtgggtgtgtgtatttttctcttctgatctgtctacttcctaaactggactattgtccaatctatagaccaactctatctcttactctctggttgatcttagacaaatatctctaccttcctgaacctcacttttcatgataacaaaaatatgtgccccaagaggatcgacagagagaatatacatgaaaaagccttaaaatactgactggtttgtgaaagctactccaattaagtttgtaaagaccctgtgatacagctatgtttatgacccttcacagataaggaatacagaaggatacacagacaattcagtacaaaggagttacctgtccacggtcacccaagactatgggttccaaatccaggggcaggaactcatcctggttcccttgctctttccagtgcacaataacccctcatgcttttgttaaacctctgagctcataatgctgggatacaatacttggcaccttggagtttcaggaaacacaagccactgcaggagcacagatgcatccttcctcacacctgctaggaagctcagcgctccctctagcgcccaagtgtggcttgcacccaggtgctggcagctctgggtttagaaaccttattctggtaaaatactgtcatctagtgtctactcttgtaattccaggctggcggggttctgttctctagggagagattgagcaggtgatcacttacattaagccctcattggagcagatggagctggtatttctgtaacacaggattgccctcaggggaatctcttgctccgcaaatgagaagcaacatctggagaagggtacctgcactagaagaggaacacagacgatggtttgcatccatttctcaacctctcacctgtagcacaatttttaaaaaacaaacaaaaaaacgcctcccaggacaagccctggcttggggaccacatccagacggtgccggcatagctctgcctcatcagccaccttgttctggggctaggtaaagagtcagaagattggggttcagatctgagctccccgcaccccagctgagtggccctgaggaagatgtgccttcaccctggccccagacttcccatctgtaaaataaaactttttggagcctggtttctaaaggctcatccagttttggtatttcaccacatgtgcatggttctgccccagtattcatgtccaagggctctggaccccacaccctggggacctggttagtctgatgcaggacacagtggtccacagttcacagacctgatctggggaagattaggaattgttcgaggagtccaaactgatgagatgacaagggaagagctcccaggaactagctagctgccctactcagtctcttgaatcccctcctgccctggtccttagctctttcccagcccccaacccccactctgtccatttgtgcattctcctcccacaccacatcccgcaagagacctgcattccaatcccagcttcttcctcctagtttttctgtttgcaccccctttcatgcctcttactaggttggtattctccaaacagtcttggagggcagacatcatcaactccatttcactgatagagaaagtagagtttgagagctaaagtgacttgcccaagagtgaccaattgttagagcccggtcttgccttctgactctacttggtgtctgtcacactgtagaagctacacccaggctgtcccctggaccttaggcctcccagctttacccgagtaacctcacaggttcccttccttgggtctggatgaagcagagcctccttgtactgaagctgtcagttcagttctctgtgtttgccccaactcatggttctcctactagccctcaccccagcctgtccaagttcaccattcctcctctttaggtaggaagaggggagatagagttggtgagttcaaggagaagcctgctccaaccccagagtggctgaccacgtttctgccctccccagagagaagcaaaatgatgcctgccacactcactgctcttgctgtccacatcttccggccacatcccagctagcagcaagcacaccagggctgtggtgatgatctgcatgtcttctggtctggcttgggccttcctggagcagctttgatgagcctggtgaagctaagagctcaccactgtgccgtcctgcaatgctgagggcttttatttgaaaaactccacccaaaactccaggccatggtgggagccacaagtgggaagccatagggacagggaacagttgctcacacccagcgaccatgtggtaaactcctttccccacctctcctggctggtattcgtggtggtgatggattgataggttgcattgggaacttccctaagtgtgggagcagataagaatcttgaaaaagtgcgtgggaactgtcctggttgagtgggaagcaaagaaaagtaagtgagaggaagtggcctctgtgtggcttgtccaaccctacgtcattccatccaagtactactgcttcagggcagaagagtctggacctgaacagagatacacctgcatttgaatcccagttctgcagaggagggattacataaacttacccaaattcatattcacacaaaatgcaaatagcaatacatgtctcaaggacgtgcgataagaattaaataacattctctatgtccagtgactggcctagatatttgccatttctattttttctatttttttaatcctcaacaattttcaatagcttattctgttctaggtccttggttagccccagagaaggcagttaccaatgaggagcactgcctgacctcaagcaacttctcttcaattcacagataaacaagtgaaagccacccagtgtaagcacagagatagatgtgttatgtttgggttacagagaggactgagagctactcagcagcatctgagagtcctgccaggggaattttccctttttgtttttttttttctagagtctcactctgtcacccaggctggagtgcagtggcacacactcactgcagcctcaaactcctgggctcaagcaatcctccagcctcagccagggaatttttcctttttgtttttttttttctagggtctcattctgttgcccaggctggagtgccatggtgcaaactcactgcagcctcaaactcctgggctcaagcgatcctcccgcctcagcctcacagtgggtggaactataggtgtgcactaccttgcccagataatttttttattttttatttgcgtagagatggagtctcactgtgttccccaggctggtcttgaactcctaggttcaagcaatccttctgcctcggcctcccaaagtgctgggattaccagtgtgagccaccaccccagccaggagaatgttctttaagcaatatctcctgtgtgctgatgtggagaggggaaagctaagtagaggcagggtcttctatgaggacaacaaggcataagggagcacacttcatttcaaatcatcaggaaaagcagaagtgtagggtccaaggagagtgacaggagtgagagagtggttgcagagagatgtggctgtacagctacagagaagactgggtcataaagatgtatgcagtactcggaataaagagcacatagtaggtgctcaagaaaaagtagctgagccaaatctaggcattgaaatcatgaagcctgtgtgcattatatagagtgatggctagactgatctactctgattgtgcagtctttagctcaaaaacctgcagtggctccacaccatcaattgggtggagcaccgagctactcacctggatatttgtggttcttcatgtcatgcctcagtggaggccagcacattcgggtaattgcaattcctgattgcaagtaactgccacttgctgtactatctctgggattttgctcctgctgtaacctccacctgcagagcccacctctctgtctcactctgtgaacatcctacccattgcaaatgtcattgtctccacaaaggcacttctgccatatctagcagataggatctcagcctcttgtgagaactctcatgcctggattgccatacaattcctgcaacactttcctttagtccactctccaaacatggaaatgtccaagttgaaagggctcttccagactatctacaacagtggctcttgaagtgttttgggagagcttttgtaaaaatctgaatatcttagtcccatttcaggatgagaatcaaaacacatgtgcatgtacatgttggaaagaaaaaattttcaggtaattttctcagacaccagaagataagaatcacatatctcgtataatcacttcatattatgatgaaatgagaggaaagtaacttgtccaaggtcatgttgacctcagggacaatggaacttgagccctggtcttttgaccttcatgtgcagctgcctctgagaacacactttttgcacagtccacaactaacttcctctgctcagcccaaccaagtaccatttatcctttcaactgcttcctgccacctgaaaagtggttgaaaccacaaactgctgttgtttctatcctattctctttgtccttagagatggataaatactatgtgctattcatcctactatgcgctatgcatccatctttttctttcaacttttattttaagttccagggtacatgtgcagggtgtaccattttctttatccagtctatcattgatgggcatttgggttaattccacgtctttgctattgtgaagagtgctgcagtgaaggttcatgtgcctgtatctttataatagaatgttttatattcctttgggtatatacccagtagtgggattgctgggtcaaatggcatttctacaagagatgaatacttttttattcctttaccatagcgtgtcaggagagagagaagatgcaagtgggtggtcagtcagccaaatgtaactgtaggtcctttagatgtaggaaacagacagggggaaatgtggccaccttggaaattctttgttcttcccctcctcctggggttgctgcccagcccaatcaagaagggaaaccgggctgcccactccaccacccccttcccctccccccacctccctgtggccacagtcagaccagcacaggcaaaaagagaacagcaagatttagtcatgcttttcctttccaggctccctcagcacatggaaggaactgactggaggctcttatcacacaggaacttaatgtttctcatgggtatctcttccaccccaatgtgactgtcaaggacacagacttctctaggctctagcacaaaggctaggaccaagtagtaactcaattaaacagttgtgtaactgaacaagctggaacagatggcataggatggactgatgtataagagatgctctcagaataaacactgaaccagttattcatatgaacacatttcttcgttagaaatttgaaaatcagaactgcttggagataggttttcttagtcatcttttatgaaataagtactgattacagaggacaggtagagaccagatagagttcagcccatgcagctgcctcttaagacatctcctccagaggcgcccagtggtgtctgagggtgtccaggagtgttccagccctctttcctcctcctggatggcccgagtggcctggggcttgaccctgcctgcttgccttgcagttagagttcagcctgatccttgcagatcagggcatagaaactgacaagggagaagtcatttgcccagcaacatacaaccacagaaatactggtcttgctttgtccagctctggggtcaagccttctgagttccctcacttagggaggaagcaagctatagaggaaatgcaggatagtcagacacaactgggtcagatctcagctccaccgctagagcctaggcaagtaatttacactttctgagtctttgctctctcattgtaagctccacagctagctggacttggcacaactctcctcattgtttttaagataaactccccaggctgaggcaggagaatcccttgaacccgggagacagaggttgcagtgagccaagatcgcaccactgcactccagcctgggtgacagaacaagactccagtctcaaaaaaataaagtaaaataaaataaaaatcaataaatcaataaataaactccccaaaccttaaacacatttatttgaggttatccaaaggatcaagtgagatttaagaggagggaggggagagaaaaagaaaaagttgaatcattcaaaatcattgtggagcaccgaatatgtaccagacactggggataccgcagcgggacaagacaaacatgggccctggtattgggaattgtggtaagtcaagattagtgcttcgaggagacggacaatgtcctgtgagctgcagagtgtgcggaaatgctcaccacggggccggacacatggtagatgctcaatgaaactgtgtccttttcccctcgatcctggaccattctcagcatcagcacatgaacccaggcagtaccaccctctcccctactggggcccatttcctggtctctttcccttctcatctggtgctgcttgaaacccacaccaagccttgtttcattgcccacatgagcagggtgtcctcttgggtcctcaagtctgcaccagaccccctacctactgcaagcacaaattcaaatccacagcaaggacccgagcaccaaaaaacacctcgggattcaaagccctttttcatgttttccagcacctccttatactctgcccacattccctttccccctatgttttccgctgacatttagcactttttttttaaggaggcctctcgtatttacatatcagaaacaatgtgaaggaggcatggagaacccctcatggcaacaggaaaactgaggggtgccccaaaggatgtcacaggcacccagcttttcaatgtgctgctgattctgacacaacatggcccaccaagctcagggtgacatgcaactgacttggttggtctcacagggtcctgcacagcacagtcggcagacttgcagccacacaatcccgcttgttgtctgcacatacactgggatttactgccccttctgcctggaacactctttcctgctttatgtgcctaacttcttgcaggctgtccaactcagagctcccaaagtgaacccagcccactcctcacagcgggtatctcacactagtgtaatttcgtggtggttcacactccttcctgtctagaagctcccagagagcagaagtccctctgctatggtcagcatttcatgctgcagcgtttaacactgcactgatgtgcagcaactattagctggaaaagagagaaggagagattttaacatcactatggctgagctcatgtcacggaggagaaatgaagaccctggaggttagcagacagacaggagttcacacagattgcctggatcagaatcaggataacgagctctggccaaaatcctgtgcttggttatactgcactgtgcagtagaagactgcaatttccatgtgtgctaaatgggcaccatttgacacgtaagattccagtgacagattgcagttcaacagtgtcttcattcattcattcattcattcattcattcattcagcaaacacctttcagctgggcctgcaaggatgaaggcatgatttatcaggagaggagaaggaacaggggctagcatggtgagcagtggttatgagggtgcggtctgaagccagaatgccctggtgcccagtcccagcttccctgaacgctatttgcgtaacttctttgagttacttaaccactgagcctcatctataaacagggataataatagcatctgcttataggcttgttgtgaaaattaaatataaagtacttagaatagtgcctgacatatttctccgggaaaatgggaacagtgacatcactgtatgaaagtgtgtaggctgctgtcttcagagcttgggggtgtgtgaggctgcatggcaaggggtggctagaaatgaagggtgagtagggctgggttcagttgtgcaagatcctgtttactgagctttgccttgaccctgttggcgatagagggcctgagctaaccttttgctcaggacagaggatggcccgatatgtggtgagggctgagggctggtgccaaaggctaggacagattgaaaggaggcagccaggttggggaggctgggaaagagctccagtgagagatgaggagggttgaggttgtgtatgggagcatgtgaaaatcaggatatgagctggctctgccacctgctgtctgtaggatttgggcaagttcctctctctaagcctcaatttccttacccaaaaagtgggaaggttggcctaaatcagcgactcttgcccttgaaataggattcttatatggatcattcaggaagctttggtcaaaaggacacatgcttgaatcccgctctagatccccatattctaaatgcaggtcagccttttccaaatgaaaaggcttctcatataatccaatcccaccatttctctaccctgtcaaaagcccctaacctggatggccactgggacactctctagcttggcatttattgactctcaggatctccaagcaagggcagactcctgcccaccagccatgctcaaagcaccacacttgcccattcctgctgggaccggcagtcggatctggcctgttaacagcaaacactcatgcggagggggcctgctggggaggttaccagaaatgccccttccccttctgatgaggctcaaaggcagtgaaacctaatgggactgatcctggcctttgaggtatttaggtccctcacccactctgagaaccacacttgcaatccttccatctgaaacttagcaagcaccttgaactgggaatgtgttgtgaactctgcactgtggttcttgagctgtttgatgctgtatcaaaaatattcaccttgcaacatctctgtgagtatgcaaggggtccctggggtcaggcatacgccatatacagcttggtgcccaggagtacaccggatgaaagtgtcctttcatcttctccctcctggcccccactcccgtagagcaggaagagcccttaggaagacctggggtagaccgggtcatattacagatgagtagcctgaggctgagaaagaaaaagtgaactgtcatgtggggacttggtaacaggaccctggagacagccttcctcttaattcccaggccaggctctttgtcttgtgatttgctggccatgtgctgatatctggagggcttgctatggacagagagaaggtgaggatgctgaagttctgcaggattcccacagcccacctggaggccaggacacagtgactttgcagggagtggtggggggaaagcccctacattttcaccccacagagcaaagatgccaggggcaggaagtggcaccactgacttcaaaatatgcccactaaaaccaacaaggccacccatcattgaggtgacacacccacaggctactgggaaagtcccccaaggagtccttccctttctggggtggcaggtggaacagcctgggacactccatggctcacagcccatttcccaatgcatcgtaggcccacagtcctgggattccatctgtccatgtctctcaggactggcccacttcgtaagaagcccccgtcacctggtctggcctcctgggctctggagtgaactaaactgaccacagatcccgcagtaagctcaaactgctcaacctcagcaactgaagctgagcctcagacacaccatcctgcacctggcctcctggccttcttctccatcctctgatggcgtgctatccagacatccatattttaatccaggttgccacccattagtacctggtcaattctgcttatcaccctaaacctctgagtcatcatctgttaaactgggtttacaatgcctctgtctcaggaatgtcgtaaggactaaatatggaactacatgcaaaggctttctagcacagagcctggctcagaggttgtgatttctctgtgttctgtgtttcctccctgcctgcgtggtttgcctgaggcatctttataaatgctctcaagagctgattctaagtgagtcaggtcctatttctcagctgtggctggctagtattgcttccttagaagagtgtgagtttcaggaaccaagtttacaagggagcacctgaagtcaggactgctgcctgccagatgtaactagaccctgcagtctgtgttccacccaccctgtgaccctgaccaagacaggtgacataatttacatggttcagtgcaaaacgaaaatgatgactctcttcttcaaaaactaagaatttcaagacagcacaagttaaatgccatgaaaccaggcattactactgcgttactctctggagtcacctctgccctggcctgcaaggtaactttccagaatcctactgttatggttttattggcctgttaaagtccttgacataaagatacatcctaaatgagtcagagagatgcatttcacttccccctaaaatagctccaagtggcacatcaaccctcaagtcatacagcacccccagctactctcccctgctccccagcggaatcaaaggccagagctgctgtcagcaaatcagatctaaggtggggcagaagggattgtggagaagggacagatgtgaaaaacatgaaggcattcattctgctgatctggattccttctcggccactgtttccagccagagctaatctcaactaaagactccttgtaccacccagatatgggatgattcagcaatggggtgtgttgggtgcccagcacagtgtcttgcataataaataagggcctcaattaaaggaatctgtcaccagtgtcctctgcaacctcttctagccaccttcaatggatgggtcctctgatatccagctgtgacaaagcaggcagatggctctgaacaccccacaccccatctcctaggccctcttgtacatggccataaacagcactggggaaagaaaaaggaaatagggaagctagcttttgtactggctctcccacccttggcctctgtctatatcagtgtcctcatccataagaggtggattttagtctttttctagcttaggtgaccagaggttgtgagcctcacagaagacaatgactggatggaagtggtgtttggctgagcagaaggttatcaacactaccatccttctaccatgactgcctctcactcaccttccttcccagccaagagattgaaataattcatgccactctctccagtttctcacctctcactttctcaacatgctgcaaactggcctctgccccctgctacatcaccaaaactgcaatggcatcaccagtcaactgcctgttgcaaatccaaggcccccctggctgtcatctcgtctgacctctcagcacccttgatctgttgaccattccttcctgaaacgtcccttgccatggttttcatggccctcctggttttccttcaacctgtatggctgttactctgagactggttaggggcttctcgtcctctgtccactccttaatcttgatgttcccctatccctctgtagcattaagatagttaatagctaatatttactaaatgcttcctgtgtgctaggtagttctctaagcacttcacatgcgttaatgtgtcaaatcttctaaagccctggaagtagatgttatcattgtcccccactttgcagatgagaaaactgaggcccagggttgtctgagattacttagctagtcatcagggaggtggtatttaaacacaagctgtctgcctccagagttctgaacccgtcctccacaccgcctctcagcagacttgttcctgaatgctgtccaaacattttagcttatcctgcaagcttccttctaatctggccacaacctacaccacctataacatcatatacagaggatgtcccctaggccgaatttcacaccgttccacctgacacaccttgctctttgcctgtgctcctcctctctctctggggaataaacttctctttgttttatcagctaatgagcttccactcttctgacaacccttgttcaaaattgcctcctctgtcacagaggccttctccacctcttcccaactctccctcttctctgagtgccaggcactttgctcttctctctgtggttatgcatattgccttataatgtaattcattcattcccatgcctgccatcttggccagactctgagctccttgcctaacacaatgcatggatgtaataagcattggcgaatgctgaatgaacatgtaaatgaacgaatgagctggcgcacatctacatagcacctgagactttcacctggcctactccgtgttttaacaaactgagccaaaaaacaaaacacaaaaaccctaagcctttacacccatatctatacaggctatcacatgcatgcagcgacacatgcatgcacacattccctcctgagccctcattcacttcctggctcagctcccttaggctatcttagccttcgggccattctccccatctgcacaggcttccaggcatctgaaaatcctgcctttcctacaatgtgtcatctcaattctgcaaggactgttttccattcttccataatatccattgcatttcatggggcctaacagttacaatctcaccacaaagtcatgtaccatgtcagacaagacagtctccaagcagaaatcagtggctaccagttgtcataacagtcttttatatgttcacaacgacttgtggcttccttagccccttagacccatttgtaactttgagcctttcaaccagatatggaatagttaatataaatctactttataaataaggaaatcgaggctcatacagattaatatatctctctcacacacacacacccctccacccaaatgccctgggcaaagtattgggctgagtgtttaataggtagctagtgatggttcactgtgtcttctctttccccaatgggtctaaagtctcctattggagaacccgtcagactccacatgattctgttaatatatggtcttatctccccaaccacagcccctcaagcccgaaagactgcttgttccacattgaagtaggtccatgccaggtgaacatgcgatgggtcaaagccatgtaataagataggtctcctccaaaggcctgcaaaggagcatttctttttagcacccacaaaagtatttcccagggcaagcctctgccaatgtctcccctgtgtaaacaagtaagcaggtgaatgcattctggctttactaattcaggtacataaacagaaaggcaagatgaatttaagattattattaaataaatgtggttctcttactttcaaccatatataattcttctaacagtattatcgggttgaaggtacttagaagatatgctttaatggaggtttttatcaggatttgtaattagccgagcaattgtgagcactttaaagtacttggaagcagattaaacccattaaagagaatcaaccactcaaaaacacaaaagcagtatccatttacatgccggcaattgctgtgccaattggaaatgcatatgctcaagcagctactgtaaatcttactcctgatgcagtatttgacatccctcccagcaagaaacactcattcattaagtaaacaaatatttaaaggatgcctactccgtactgggcactgttctatgggctggtaactgaaacacacaagacacttgtttttgtagagctgacaccttgcgagaaaggcatcgttttcatgcaagctagtatgtgaacaagataatttcaaacaggataagttgatgaaggaaacataacaaaaggatataactagagaaaggattacagagtttgcatttgagctgagacctgaatgacaagaagatgtgaaaaatgaagaggctgaatattccaggcagagagaattgcaaacatgaggcctaattcatctttgcttgtgctaccttctgaataagacaaagatttaggtaaaggtagttgactgaggaggtgcagggaaaattagtaagagagtaggggagcaaaacagggaagggacacacttagtaaaggctgtcttatcaagtcagccccattgaggttgaagtctgagaggaaggccagggaccaactcacgtaaagcctggtaggccatgaagtattagaaagtcagtctgtgctgggcatggtggctcacgcctgtaattccaacactttgggaggccgaggcaggtggatggcttgaggtcaggagttcaagacgagctggccaacatggcaaaaccctgtctctactaaaaatacaaaaattagctagacatggtggcgtacgcctgtagtcccagctattctggagactgaggcaggagaatcacttgaaaccaggaggcggaagtttcagtgagcagagatggcaccactgcactccaatcttgttgacgacagagcaagactccgcctcaaaaataaaaaaaaaaaaaagaaagaaaaacgaaagtcagtttttgtgtattagaaagccaattatgaaatgcagccagggataggaactgacttctattttttagtaagacttctctctcagctgtatggagaacagattttcaggacaataagaaccagtcaagaggcaatagcaagaagccaggcaagggagggcaatggctccggctggcccggggacagcgcaaagtggatggatccaggtatgtcataaaggtagagcaggactgactggtgagttagatgtgagggaccaggggaaagaaggatgcagctttggctcaggtgtgccagtacagagtaagaggaagacaagagaaacaagtttcatctcgccagtctccaggatgggctctgccactctcattgattgtgtaatcgggccagccactctcccaaactgggcttcagtgttctcatttggaaaataagagagaagaactaatcaacttcttaggaccctttcaacgttaatatgctatacttctaaaaaaaaatcagcctttgaagttttagttatttttaataaatccataaacccatgtaaaccaccactcaaaataaaagcaaggatcttgacaataagatacatccaccatattttccctctatactgctttccctgactcccccaacctaaggaaaccaagacctcaatctcccttactttctcttttccatatatttgaccaatgtgtgatgtgtgtttctaaaatgtatatatatattttttaccttagttatttttactttataaaaagggtatcatactgtttatttatcacactgtttatagggacttatttgttgaatagtattttgttaatatctaggacattatcattatcatgtatcattatcgctgcagttcatttgttttaaatgccatattatattccattggataaacattctattgtttatatagtcactctcttttgatgggcatttgagtcttttccagaattttgtcattgtaaacagttctgaacattctgacacacgaacattcttatatatgcaagacttccattaggtatatatgaaaagcagaatttctgggtcagaatattcactgtcatgagaaagttatatctatcagctctaagtgtcccctcctctgtgaaatatctattcctagtttttcccatttttcttttgggtgtttgtatttttctcatcaacctctttggcctgcttcctgcctgtagaatactatcgctcaagatcctttcatgtccttaaaaatcagtcttatttaacctaggctggcagcactttcagcaatgtaactctctcgaaaacccttttcgaaatgtcagtagccaaatccacaattcattttgagacatgtcttgctctccctctatatgtagtttcaagtactctgacatcatcaggctttaggagacctttccatgagacattctgtctaatggacaggattccctgggagtgccgtattcttatcagaagtcttaacaaaggcagtgacagttgtgccctggatttggtcttggtctccaggctaagtgttcatagccatgcctttgttttgttttgtgccttaaagctatgtattattttgagaatttttttaaccacagaggttggaagtgagagattattgcatctttcaacactcttagccctagcatttctagactttctatattccctttcagttccacttgcaaatgagcctgccctttgctgacatcatttctttcttgtagtacctcatgaaatgtagctagtaaaagctaactcacactaaccaattctgtctcaaaacctcttctcccaaagctataaattcagtaggtttattttctgccctccgagttatcatatgtgacagttttaccaaatgtttcactacagcattccataggttgccatttctctagcccctataataatttctctgctgtctgccacccagctgcaaagccaaatctgtacatcttatcctttggttagagcaatttctctcttctaggtattaatttctgtatcggccagcttttgctgcagcaacaagcaaccccaaaatatctgtggctgataacaagaaacatttctcttttttgctcttaagtctgcgggccaactgcagcccttcattaagctgtgggtcatgtcagtctttgtcacaagtcttcccaattccagggtccagctaaaggaacagctcttgctcaggacaggacattctactggcagagggtccaagagaaagaggattatcagaaacttgcaatgctttcaaagcttctgctgggatctggcatgtcatatctgctaacattcttttttttttttctgagacagtctcactgtgtcacccaggctggagtgcagtggcgcgatctcagctcactgcaagctccacctcccgggttcacaccattctcctgcctcagcctcctgagtaactgggactacaggcacccgccacaacacccggctaattttttgtatttttagtagagacaggttttcaccgtgttagccaggatggtctcgatctcctgacctcatgatccgcccgcctcggcctcccaaagtgctgggattacaggcctgagccaccgtgcctggcccatatctgctaacagtctattggctcaagggaggtacatggccaacctcaaagtcaacggtgtgaagaaatacattctaaacccttttaaatgagaatagagcctcctgcagatttgaaggagctcttgatatgttcttatattaatccttttggtatgtgtattgcaacataatctcccatttgtaacttgtttttaagttgtctccttaaaaagtatgttaatatttttattgaaaagatgtataggtttaacaaattgtagtagctccactatccagacaaccattttcatttttattgaccttctagtccctgtacacattaaacaaactccaccccagagttacatactataatgagtaactcaatgcaattatcaatttctacaacatgcaatgctaccctaagaactgccgcaaattttaagtccagaagataaagaaacagaaacttagcaaaagataaatatttacaaatacagtgtagaaaactgcaaaatatttcaacagttttaaaaaatgctttctttcaggcagactccagggacaacagtgagcagggaaccgcggacagtctccagatctcagaaagaggaacttgagcaaaaacgaaacagaaaaaaaaaaaaacaagaaaaactattctttcgaaaccttccagccacctcaaagtgagacccgtaagcaaacaggtatacttcagaagtctctaattctcattagttgactttcagtaatcgatgttggccccatgcagatgttttaaatcactaacacaaacattgctgtctttggtattcttgcagtgttttcatttatgagaaaacctgcagaagaaactgcttgaaccaaagcaaagtagcaaggaaacaggttactatataatcagaaggccctaagaaaggtagcagcaggtcatataattacctccttgtggataaaatccctgtcctcaaactacgcaacctactacctgtacttcttccttaggaaccaattttttcttgccagtcttctacttggcagatgccctttaaagaaacctgtgaaattaagccaccttttttgatttttttttccaaattcaaaccagttagaattgtttcacagatgcttttaaaaagttattggccatatgatgttcatcaaaaccacaaatgcatttgcttaaaaccaaacttcaaataagttaggaaggggcgaaagtaattcaattacattagaagatgcaaaccagtagtctaagcctcagcccaccatatattgttggagcacatattttattgaaagcgtttaatcttcaaaattcaaacatcaaatctcataaaatctccggccttccttgatcaattagaaaagtagatgacacaatgtaactcctgcttgctgcctatcacctggagcaaattaacaccctgcctgtcccctttagatgccatgcgttttctagtcatagtcagctcctcctgggactctgaaggtatttcagcttttcagtttttgacccctgaattatagtaaatggaagcaaattctgatcatgatttttgtcaacattaaaaacaagctttttgaaactgtcactctctccgcaatggtacttttaagtatttttacaaaatgtacccattctccataatttggtccacttactccgcctggctattaaggctgtaaaatggacccttatgtaattaatgaaacatgtaaattcatttttctccaggccttacttagttaattagttagaaaaagataagtttccaactgcagagtagtagtaatatctacagtggagacacatgtcagaaaaccacaaaattcctgtgaatgaaagaatgactgtacttgcctcatgttctgcaggcaagttatgcatgttgtcagtttaactaagattatgccaaagagaatttcgtgaacattctcacttttctttggcatacaccgaaaggcaacaaatgtaagtttgttttttttttccccaatgtttacgcaatttggaacaaagaccaattatcaatgtaggtgccctaccatacgtctgggaatacataaaaagcacaaatgtggtccaggatacatcactttttttgggcccacccaagggagagtttgatgtttcctcttacgtaaagttactgttgtcaatggcactgcactagatattaacattcaagataaatgaaaatatttgtgaggtggtaaccttttcctcaccttcacactttgccccttttccctcttgtcccaaaataaaataaacagcaaacacttaaaacagggagcttttagccttgcttggctataaggcacaaggtagaatatggtttggctattggaagaaagctgaaacatggacctttcacaggtattaaaattcaaggtaacctttttagcattttgcttctattttatttaaagcaacaaattatagatgtctcatctgacattttcaagtaattccccctttgtgaataaaggaccacttcaagtttagggagcaaagttcagagcttagcgacttaccagggagcaagggtagagcgcagagcccatgtctccttttccaggctggtggcgaaactgcctaaatcagcacagcaatgcggcagtgctcacagcattctccaatgccatccaaaaccaaactgggaatgaatcataacagacatgactttctttcagcttagagagtgctcttcaatttgtatttacctttacccctcagaacctcaccttggacacagatatcaggatgtaaggcagtgaacccactgacaattccaaagggacctagtcccctattaagatttctcgaggagtccttactttctccactctttgagattgttgcttaatttcaaatttctgaaatataccatatgtgaaaattgtaaatgttaaatcactgcatctattgtactacagttgaacagagaaaattaacaactgataaactgtaaatacaaaagaatgtcaaaatttattactctgagttttaatatcatctagataaaaacaaacaaaataatgtagcaagcctactcctcagtcaagttgtcgttttatgaaagaaaaatcaattttaatacacatgtatcaatctcttattttatagtcaaaactcctctgtcttaagacacaaggttaaattgtcacccttagcaaactaacacaggaacagaaaaccaaacaccgcatgttctcactcataagtgggagttgaacaatgagaacacatggacacggggaggggaacatcacacacaggggtcgggggaaaggggaggaagagagcattaggacaaatatctaatgcatgcggggattaaaacctagatgatggattgataggggcagcaaaccaccatggcacatgtatacctatgtaacaaacctgcacattctgcacaagtatctcagaacttaaagtataaataaataaataaataaataaataaacacatatatatatttaaaagttttaaaactaaaaaaaacccctattctccaatatttaaaaaatatttctattaatattttctattaaaaattttaaagactttttaaacatttaaccatgtggagttgatttttatatatcatgtaatgtaaggatccaatttaatttatttgatagggattaccatttttccaggcctaatttttgaatggtctctcctttccccattaatctgacacacaaaccatatcatataacatagctttatacatacgtgcttttgttcctggacttttgtatatcattttattggtcagcttgtgtatcgctgcattgacgtacaactcataacaagttgtggtatctggtaacgtaaatcccctctgggattttttttgttttaactggaagtgtctgtctatttttacccttttgttctttttttttgagacggagttttgctcttattccccaagctggagtgcagtggtgcgatcttggctcactgcaacctctgccttccggtttcaagcgattctcctgcctcggcctcccaagtagccagggttacaggcgcctgcaaccatgcctaatttttgtatttttagtagaggtttcaccatgttggccaggctggtctcgaactcatgacctcgtgatctgcccgcctctacctcccaaagtactgggattacaggcatgagccaccacacctggccccttttattcttctttaaaatttttttagccatttcatcaagttccaggaaacactctgttgggcaccaagctatgctgttactatatactggcttattgaaccccaacagttacccagtgaaggtcaatattattctccccatactatagatgaggtgcacagaatagactggctccacagcttcaaagtagaagctccaagattcaaacccaggcatgtctgacttgagagcccctgtcatgcccacatcacacagtttgggttggcatgtgcccagctaggagatgctgagtcaatcctgccctctgggacccacagaaaggggaggttgtcaaaggtctcatggaacagctggtgtttcctgtcattgttctgcatgcctccctgtccccagttcagccatgcagcgccgggggtgggagtgggacgcctgagcccacagaacctggtaggtctgcagagtcactagcggtgtatgtctgtcactttgctgaggattcctagcgacagcagaaaccatgcaggctgcgtttgaggcagctcattttcgctaattaaggaaaacaacagcaaacagaagcctgacatctggaggtgattcatagtctaagaaaagggcagttagttggtctccacagtagaggagtctctctctctttctctttctctctctctctctctatctctgtctctctctttcctcctcaccccctgcaccttaggactggggagatgagtacatgtgagtacctacagttcttgaaagagaagaatatcatcttattactccccttacatacaatgaaacaaagatggttaaataactggccaagtgattccatttctctatccccttggtagaggatgtcatattaaggcagctcatttgcaaagttgtcatgagcaatgagagcttgtagttagagcagtggctctcagtactgtgccagcagcttccgcattagctgggaacttgttagaaaggccaattcttgggccctactgagccttaaagttttgggatgaggcccagtaatctctttaacaagtcctccaccccgagtgattctgatgcttctcacatttgagagccactgatagaggggatcttccacagcacctgacagagcgaattctcaatcaatggtaactatttgggccagagctcaaaatgctcattcatgaaaagccaaagtctcagcctctggctctgctgactccagacaactgtttccatcaagtgtcgtcttaattcctaggagtaagacctctttctgggaagatttgtcccaaggtcagacatcggtgtattggtagagattacctggagatattccactttagggcatgaaagaataacaacagggctgaggttcaggcatgtgaaacactgtggttcctgtgtaatcttatttaagacccttggaggttgagtctgggactctcaccaagtcaaatgtgcatgtgacattattatatatgcacacacctatacatacagcttctcattcatacataggggttgttaagtctccattatccacaagtaggttagatctctactgaagttaacaggttggtttaggtttgacttaacttttatttgacagatagcctttggaattgaaaatcattgtgataaaacattagagtacatgcaaaaagattaatagtcctatcaatttcaaagaactacttgtttctcactttccattatttatctttttctacataaatcttcatatcatctcaatcatcatgaatgccaaattttgtgtcttcttttttcactgaatatcataaacattttctgtgatgccccttagttttcataactgccattgtgatgacagaaaaatatttcatcaagctgaagttacacgtctcaatatatagatatttagctggttatttaggtttttgatatgtagatatttattatagatatttagcttgttatttataaataacacttctgtgactacttttctgcaagtcccattttctacttacaatagttttctttagattagcttcctagaagtggaattacaggaagagagggcatgacacaactctgactacaggaacatacagaaaaaaaacattagttaactctgttggtagcagtattaatacacctgatttacaaaatgtagtctttatccctgagtggtattatttctccccctttttgacaattaaatgagaatgcaattgtatcctaagttattggtttaatttttccttttgtaaatcccagctcttcttttttcctaaagacacagctgttcaaattgggtttcaaagaaaatttatttcaattagtttgtacctatcttcacatgcatgtgtttctggatacatgtgtgtgtctgggtatatgaccatctctccgcatgtgtacctatatccatgtgtatggaagaacacatatgttgtagactgtatttgcctgaggttccactgcagatgctgtttctgagcatgcattggttggaatatgtttacgtgtatgtgcaaatatctacatctaagtgagactgtggatacaatacaactaatgaaatcaaacacagactacttgtggcttaacacggttcttccgactgcactttcttgttgactgtcaccttcttgcatagctccactaacatagggtaaaaactaatgaattccaagtaacagtgaagcatccagcggaattgaagtcatttgatcagcaaaagcagacagatcactacaaggaggaaactggcttccttctttccttccttcctaccttccttccttccttttttttcccttttttccttatttctttcttttgtgagacagggtctctctctgcccaggctggagtgcattggcacaatcacagctcactgcagccttgacctcctggactcaagcaatcctcccacctcagcctgtcgagtagctgagaccacaggtatgccaccatgaccaagtaattaaaaaacttttgtggtctcactatattgccagactagtctcaaattcctgggcttaagcgatcctcccgcttcggtctctctgaatgttgagattatggtcacgagccactacacccagtcctggctcttcttttcatgcagagaatagatatgtcctcagtggacttggtatccaaaaaccacttgtcaggttaatgacactgggcaagccactttacatttccccaaaccccagtcctgaccctgtgttctctgagtctaaactagtggtcagaaggaaggatgctcatgaaagctaaataagatagtgcccatgcccacagctccttgtccgcagaaggtgctcagaagccacggcctcctataggaaagggagcctttcttaagtccctgaaagagacaatgaaggctcataatcttaagggttgccaaaagtctttgcaaaattctgccttgaccagcgctaaagcctcacacaccattgctgagtacgtgcagtgtgagggtagaccaaactctctatgccatggggaccttggggagctagtcaaaaagtccacatgggaagtgggagggagttagaaatcactgggacaaatctgtacactcaagcttttaaaaatccaacagaactgctctcctccttacacctttatccaaacaactttttcagggaaccccaaactatgacacagacaaggggcagggactgaggatgggtgggctgcctactcaccccctccctgtcctctgacaggggcttctagggcaatgccacactctgaaagccccctagctgaaagccatgcaactagatggcccctgagtctctttcagcattgccagccatttgaaggaaagcattctaagtcatggtctccaagcagtagcaacaaggccaactaacacttattcagcgttttctacatcccgggttccacgcttcactttttagatcctttctctcactttatcctcgtgtattccccaggaggaagaccctgatagtattttgacagcaccgcggctgctgtcctttttccatcatggccctagttacccagccctgctaatgcctgtctcagggctacctcccccactaacgaggagcccttggaaacagagcgctggtgcactgatgagcctctgtgcagctttgcctgtggaatgaacaccccaacctagacctccaaggagctgaacaaccctccctagcactgctgggctccaggcatttgcaaagggccctcagttctgagaacccctcaggcctctgaagactcattcttcctccctcccacatatggtagcccttctccatctctgggaaatcccagggcagcacctattgggtgcaaagtgggtgttcagtggacaaatttcttcccccgccaaaactgcatgggggaagggacattcaaactctcttaactgtaaggactcccctatctgtccctccctctgctttagaacttaatatcacataggagggtttgcttaagagcctgggcactggagtcagctggacataaatacaaacttgctgatgatgtgatttggagcaaattctttaacctctctgaacctctaagagaaaacagttactaactcattatgaccacatagtgacgtgagagtcaaataagataatgcacggaaagtgcttcgaacagtgtctggctcacagtaaatgctcagagagagcttggaaagaaatcctgccctgcctcagaggctcagagcagcaagcaagaaagagccaggtggtcagagtggaacagggagcagctaaacttgatgggagacaggagcaggaagactgcccaattcatgagaagcccaatgcccagtcagtgggagcaggggaggggacagtgactcaccacagtgacttactcaaataatctgccccaccaccaccaccaccggcagacaaaaaaggaaaatctacccaaatattattagccacaggaagcagcagagtttaggcagaaaggccttttggtggtagaaacacatggacaatgtgctagcaaagcagaaaaagagtgccaggcaggcaggaaggagagaagagattaaaagtcaggctggctgcagaacagagaggaagtcattggtaacagcttctccaggccccacagctccagagagcaaggtcaaggaagctaaaaagatgaagcccctagggacccaggaaggtgcctgcttcactccagcaaaatgtcccctttcctttaatccaagatctttttcccatggtctgaggcgtggaaagagaagagggacatttagctggactaagcccctactctgtgcccaggaccaggctgcaataagctttacctcctgctatctctcttgcctccaagaacccaacagtgcagggggtagcaccccccaggcacagctgagaagcctgtcgctagatacaggccagagtggggatttaaacacagactaatggcatgcttagctccacgcttttcctttcaggcaggtaaagcatcatgctgcggcactggggttgccagtagccacttccatcaattatgtgtgaccttgggcaaccaactcgtctctttggggctcagtttccatggctataaaccatcacctacagcatatggtgttgagaggattgaaggagctagagctgagcctggctcagagctggcactcagtttgtgccacctgtggagcttgtattcatctcaagaaaagccatgcctcaggagaacagaagaaaacatgccgttcccagcccacattggtggtagtggagagggcactgggcttggagttcagagacctgaatgggagcccaggtcaacaccttcctagggctgtgatcttggatgagtcactagactcctccaaacctcagtgtcctcatctctgcagtgaagataatggctgggaataataccggtattcctaaagctttggaaggctgaggcagcaggattgcttgaggccaagagtttgagatcagcctgggcaacaagcaagactctatctctacaaaaaaatttaaaaattagctgagtgtagtggcacatgcctgtagtcctagctactcaggagactgaggcaggagaatcacttgagcccgagaattcaaggctggagtgagctagaatcacaccattgcactgaagcctggtatcacagcaagatcctgtctcaaaataaaataaaataaaataaaataaggacgggccgggctcatgcctgtaatcccggcactttgggagaccaaagcggaggcatcagttgaggccaggagtttgagaccagcctggccaacatggagaaaccctgtctctacaaaaaatacaaaaattagccaggcgtggtgcacacctgtaatcccagctactcgggagcctgcggtacgagaatcgcttgaacccaagaggcagaggttgcagtgagtcaagattgcaccactacactccagcctgggcaagagggagactccatctcacaaataaatacataaataaaataaaacaaaataaggataatgactctcctgactgcacaggatcatggtggagggacatcgtggagatgacagcacctagcagggatcggggggagcagagaccaggaggcacggactggcctttccccgtggtggcagggactgatccactggtggccagtgacagggagaggggaaggagcatgggagaagatgcagatacccagaaagatccaaacctctaccgcaaagtcaaggtagacatttccccagccccggggagtgagcctgatatgcatggagcaaaggtaaatggggaggctatcaggctggggtctctgtccttttctttgtcaccctctgctcaaggcagccactagggagctgactggccacagggactttcttgccatgtaatcctggggaaagctgctcacccactttgttccttctctttttgttgtccacactaggagacagtgattctcgccaagctcctgtgtgggcaggatgagaacgaggaggaataaaccactcagaaggaaagagatggaagatcacataaataaccacccagtggggcattcaacagtatctccctggctgaggggtgggggtaagggcacatcacaggaaggtgtgacagaggaggaccaaaccacagagacgaaaattagcaacaaggctgggaagggaaacccttgtgggtaaaactttgcctccacctcagcagcatacatggggaggcagagctgctgtagggcaaagtgggtgtgggtggcggttcctcagccccctgctctctcccagcttccatctggtctgcgtgaaaccagaatggaattggagggcatgaaagatttgggataatagaccatttgtgtctttcctagctgtatggctataagcaagacctcaccttcttgagctttcattttctcatctctgagatggaaaggtgatatctaccttactgagtagttgggaggagaaaatacagctgtaagaatagtaactactgttacatgctggggtgcatgcaatttcattaaactttcacgacaactctatccaatgaatgttttcatatccatttacagagaaggagacagactcagagaagttaagtgattttcctatgacaaacagctgataaacagcaggattaatgtcaggcccaagggttgtcagacttcatccacacgttggagcctgacataacgtaactgataaataatgattcattcacccctccaaaatcccttccctggttcctactccattcccagtggctgcctgtggctgggctcactcctcggtcttggtccaggactgtggtttctgtgcaggctgccagtgaagaagtctaggcctgtgatccacttactcctgatatcacctctccctggaagtggctcctcaatttgaccccacacgctgatgacaaatacttagggaggtgatctagcaggaggaggtctagtgatacaggatgcattcatatctatgatcttgagcccaggctgccttcatgtagcttcttttgtctgctgctgtacagaggtgggagatcatgaacccaaaaaggagacagttgaaggtgtggaacccaatgctgcatcaggagagttcattgcaaagatcactcgtgacctaatcctcccctgaagaaaacaagcagccactggtctttacccttgaagtctctctgctttccctgacaggatattgcaagaatgctttgggatggagggacgaagggtgatgggctttcaccaagcccctgctgtctgccaggggttacaataggaacttgacgtgagtctcttcattgaggtgcctcagcagtcctgaaggacaggcatggtatattcttaaaagaaagcactcaggctcaaggaagtttgtcaaagtgccaaaagccacctagctggtaagggtcatcaaggcccgtctgacttcatgtccacgctctttcctttccaccagggccccagtggatccgcctggttaccatgggagaccagtgcttcagaccagccatgccaaggtaggtggaccttgcttggtgatgttcttcattgtagaccttcctgcagatttcagtctccttttcatcttgagccccaacatgactgtatccacagatcacctatctgacatgtttcctgagcactcactcattacgcccaaggccctgttctagaagctgggcaaggttataacatgaagactgagaatctgtcttcagagaatttagcagagaagaaagatctaaggaaaatgggaccatagtgccaggggggtacgagtgaaatgccttgagcaattgaggggacagacagatcaccacctctctggtgggaagggaatagccaaagaggtacaggtcaagccaagcatctgattgatagcttagtgttcagagttggaagggatctcaaaggttttctgacccaaacctctcattttctacatgagaaaacggaggcccagaggggagggtcatttgcataaagccacatgacatatggtcagcatcaaagccaggtgaggaccaggttccctgactcagcactacctttgttcctcatatgcccccaagcaaggctgacaggtaatctagcaagtggagcccggtgcaaatccactgccataactgtaagaactcagcatgcttaacatgccagccttctgtatcaactaaaattggattcagctgcacaaagaaacccaaaacaatcctagcttaagcatgagaggagtttttaatctctcagataaaagtccacaggcctgaggtccaggctggttctgcaaagttgttaaggaccaggctccttctagcagcttctctctgccccagtgtatggcccccatccaacaacccaagctgagggcacctgcactccaggcagcaggggcaagatgaggaagaggggcgatgggggcataccctgcctttctactagggttgctgaaggccatcacaggacacatccctttccagcctagaagttagagccttgctggatgggaggctagaaaatgtggtttttattcggggtggccatgatcccagtcaaaatttctgttacaatcgaagaaaggaagaatggctatttgccttcggttttcacttctaagtttgctttctgtatcctgcctctttcaacctctccttccccaggtctagataccctgggtagcccctgccttggtattcattgccttatcaacagtttgaggtgtggtcacctccctgccctactcctgcaccttattcagcccagcaacagttgcattctctcgtcggccacagaggccacttggaatgggcagggccgctgctgggcttggggacaacgagcctgagctctaattgacatagctcatcactcactctgtgcccttcacctaattacaccctctctctgagccaggagagagagagagtgtgtgtacatttcatatccacagaaagacaaaatgaaatgaaagggaaaacatcccaaaatgtatcctacagataggcccgtaagtaagatatactgtagcatctttgaatactcaagaaaacttttataatgacaaaatattggaaacaagctaaatagccattaactgaaaactagttacttatatgttagctctatataatagaatattttgcaactatttagaaaaataaagccactttatgtgtgcttatatggaacaatattcaaaatacataaagtactaatggaaaaggatggaactgcatgcatggtatataacctttaggtgaaatcatattcactcaaatgtgtgtgtgagtgtgtgtgtgtgtgtgtgtaaacttcctctggaaggatacgtgagaaagtgtctctaagaagagggactggtgtcgagggacaaagagagacttgcttttcagtacatgaaatttttgaattgtacaccaggagacatctaaaataaaatataagaaaggaaagggaaacatcgagtaataattatttaatctttgacccagagacaattttcttctagaccttacatgtccctttagaaaaagcaagacactgggtaaaccagctgaacccccatctggttcagctctatccaaggtcattgtcaccactgccttccctggagtctatgacccctctccttctgacacggcccttggaggaagagatttcagtgctgagaaagagaaaagaaccagacaaggaggtttggagtcttgctatgttgagcttctctcagggaacccctgcctgtccagcccactgttcctcttatggggtgaaggggattgagcaggatgcttgtattgcaagggacaaaaaatttctaagttgacctagcctaaaccactgacctagttcatcagcccatatagcccaatttattgcctcaatgcaatagaaaactcaagaaaggagtagaactgaatctggggggcactggaacagggacctcacagcctgtcagagctgccctgcccccataggtctaatgtcctcttcatggggccttgattctttcctccaatggcagccttcacaccagcagctctgggctcatggccaaaagctcaggcacttgagaaaaaaagagtcactttctcccatctccagttagaaaacccccagggaatgacagtcactggcctggcaggagtcagatacccacttctgcatcaatcagtgtgactagaggagcaggcttctatttcaggtccagcaagcgcacatctccccatccatcccagcttacaggaagtgtcacttcctccgagaagccttcccaaatgcccccgattaaaccctcattgcactgttttctccctcactgcacttgtctgagctccagtttcattcatgtgtctgtgattatttatttgattagtgtctgtctcctcccctaaatacaagctccgtgagagcaaggaccagtctggatttgcccttcttgaatacatagccctttgcatgggtctggcacacggtggcagaaagtggaaatagggggtttgaaaaacataatgacaaatatgctgtggctgctttaggcctggctgcatttctctgttgactgtggcagcccttattttctccttagaaaacaagccccctgaagttcttctggcaatatccatcctcccacaaacaggcttgggcctggtacctagttatttgttcaacaggtatggattgaacaccactatgtgccttatgcttttctggggtgggatatgtcaatgagggacatagagagaaattccttcctggtttggggagactgaaaagagacaaatgaattcaggaaggttggagagagggatgcaatttggaagtggatagtcagggaaggcctcaccagaaagtgacatgtaagcaattcttttttgttttcagacagagtctcactctgttgcccaggtgggtggagtgcagtggtgccttctcagttcactgcaacctctgtctcccgggttcaagcaattctcctgcctcagcctcccaagtagctgggattacaggcaggcaccaccatgctcagctgatttttgtatttttaggagaaacggggtttctccatgttggccaggctggtctcaaactcctgacctcaagtgatctactcgcctcagcctcccaaagtactgggattacaggcttgagccaccacacccagccaacacataagcagttttgaaggcaataagggagttaaccatgcagccatccagggaagaagaggtccaggagaaaaaacagccaatgcaaagcccctgtgcagatgcactcctgaaagaacaacaaggaggccagtgtgcctggagggaaggagaggaagagtccagggttaacatcaaggaggaagtaacaatcagttatctgcagagactaagatgccattgtaaagactctggctttgactctaagtcagttaacccctggagaagttttcaacaaaggactgacatgatgtaagttgtgtcttaacaggagtcatctggctgttggggggtaaaggacagaagcaaggagatcagttaggaggagatggcataagccaaatgagagatgataatgcctcgagccaacatgtgagagggttggatatactgtgatgtcagagtccagaggatttgcaggtgccctggagttggcaatagagaaatagaagatccaagggtaactccaaggattagtttttagctgaacaactcaaaaaatgaacttaccatgaactgaaataagcaagaatacaggaagaacagatttgatggagggtgaggagaatggcaaggggttatcagtttggttttggccatgctatgctcataattcctcttagacacccaagggaaaatattaagcttgatatacaggtagatgagggtatctggagtttgtgagcaataatgtttgagagccattaggtttaaccacatgaaaatatcaacatccaaccattttgacctacaaaatggtaatctcttatggtttaacctacagatggttattaaagccataccactgggcctgatcaacagggctcggacataggtgaagaagacataaggtctattgactgagacctggcatactccattgttaaaatgtcaggaagatgaggagaaaccaagaaaagacactgagaaggaaccatggtggggaggtggtggtggcatgatagaaaaaccaggagaatatggtgtcctggaagtcaagggaagaaaatatttcagaaaggaaggagtgatcaacatagtcaaatgttttgcataactcaaggagaatgaaaattgagaattgaccactggttttagcattggtccctgggggactgggtaaaaattatctgagtggattcaagagaaaatggaagaaaaaaattggaggcagcaaatatagacaaccgtttacagcttacttttttttaatacctgaaaggactgttatatttgagtctttgaagataggcaaaggactgagaatagagtatttgcaatcacacactttagagtaaaattctaataagtaactcccaattcctcctccccagcaactagtgaatctcttagctaaggaaattatttctatgtgttgagcccattcaggacctgctgaaacttgactcaagctattctgatcccatactagtctgagatgagaagattcacttccacatgtcaatatgtttaatattaattacaaagaactatcagactctcagtgtgcaattgttcagttttaattttaagcagagtcttactccctgtgtttctcaagagggttgctctctccaggatgcctgcaaaacaccagcctctggttgctgttatctagaaaggcttcactctctggccctatggcttcctctgggagcttattaatgacaccaagacatgaacccaggtcttcagacttcaagcaccatggcctttccacggtgcaacactggcttttgatgctttatttgagatctttggggagatagcacctgcaatttaattgatttttttatacagttctctgtgtaccaaccctgactcccctccagagtgtacagataaatcatagcagatagaaggttaaaatgaaatttttacaaccgtaaaaaatgggaaatatttaaaccatcttatctcagaagaacccaggactgaatcgccccaaacacacgtggtccacaagaatctgttagatcctaagatctagtaccaaaaatactgacaatttgggcaaataaatttatattgtcagcggtagaatgtccaggctgataaagtacacatgtcttcagtatcagagctatttgttggcttgagtttttttaaaggtcattgttgaaagggtagccccctgtgggaaagaatgcatgagaattgtgttgaatttttaaagcctgtggcatttaggccttaaatgatatttgaaagtactctctctctgtctgtctctgtatttgtccttttctctcttctctttctctctttccctcccccaggtaatttataggaaaaaaaagagagtatttaaataatatatgttttcttattttgcaagatattaaactttttaaattacacataaccttgagatttaaaaaattcactttgcagctgtccttgaagggtttgttgctttgtgatccagggtgagagacagttctaactcaacccgtttacagagattaaacaatttgcctcccttgagacctgccatggatttccctctgggctttagctctcctccattccttaggtgcaggctccttccctgcactcccacctccaatgatattaaccatatggaggctgaagtgcatctgccaacatgaacaaccttgaattgatcttcattagcatgattatcagcatccccttaacacaataatcactgaacactaattgttttccaggcatgtaaagttcagtgcttacatgcattgtctcattaaatcctatgacaaacacaagttgtagttatgattataattctccccattttacagagaagggcactgtggctcagaaagtaagttaattaagatcatctactcaggaaatggcaaggtgaaaatttgagcttagatttgttggccccccagagtccatttttgtaattactatgcagtgcagctttaaaagttaagatcatcaccaaattactcaatcttaaccaagacatttttaatttatctcccatgggataacacattatgagcatttactttctgatctcagtagaatgcagagaaggttaaactattccctccctgagacagcataatgcagtggaaagatctcagacaaggatgtatttcctaggtccaccctgacttcttaagggctcttagtttgggcttccatgtacccccttggtacccacattcatatctgtaaactaaacataaaaatacctggtgtcttagctaagatactttgggttatgagtaacagaaacagaagccgattcaagttttcacttagcacagtgtttagcaaatagtcgatgcaccataaataagtggtgaatgaatgaatgagtgtcttaagaaagtaggaaaggtatcagaagaatcctggggcgtcatgtggtatctaaaagaaacctggaaatcaaagcttcagaaagatcagaaatcataggcagctctggtgatctcagcaggagtttgtgaccaacgagtacagagaccaggatcaccagttcctcctgccacacctctgccccagccctggcaatgccggagaagtagcctggtgttcacgtttgtgcatatgactgagtgtctttgacaggttgagtccccatagaatgtgttacatgagatgctaaagagatggaaaatagaggttgcttttcaggttccatttccagtcaagattcataacaagcacggatgcttaacctgccccccaagatcaactccagaggaacacaaaggaagggaaaactgaaaaccaggaggaaccatgggggtgtggtcctattttgaattggacggtagggcggaaggtgatggtgtggcctgggcaggacgtatcccagcacagcagcagaagtgtaaaagagagggggaaatattaggaattctgttctttcttctccccagtcacagccttgggaaaaacctgtggagactaaatcttatgccctcattattgtcaggagtaaaatcagagctgtacagaagtcctgtgctaaagggaggctgagcaaagcaggcagagtgactgacttgggccgttacttcctctcccgtcctatctgaacttctggggctgtaaaattactgtctaaagagtggatcctctctatgggtggcaaagggttaagattgagctgagaggtgtcttggtaagtgttttctcatgccaggggttccgcaccttaaggctcacctctccctacttcctgagttcactggaattgaagtagatagaatctggcatctcaccaccaacactgccaaaaggagtaaccaatactctcagggaaaaatgagctcacaagtcaaaacaacaggacaattgaggagcacaaacatttcaatagaaaatagttatgtttctgggcccagaggccaggctgggttggggaccaggatcccaaccctgtgacaatgggagaaaaggggactggaactgttcctgagcaaatacctcatggcaagtaccatgtgggcttctctgtacaccatcttgcttaatctcacctctgtcctttgagataggacttgtcactaccacgtcacaagtcagaagctgaggctcggagcagtcacatggcttcttaaaggagacccaatttacaaatagcatgacagattttaacctagacctaagctctggagtcagaccatctagatttaagtcacttcctaactgcatgaacttgaccaaatcatttaacttctctgacctcaacttcctcttctgcaaaacagggctaaaaattgtacctaactcattggattgttgtgaggatgcaatgaatttagaatagctcctgatagttatgtggtactcagtaaacattggttgttattttaattatttccagctgtgtacctgtgcctttaacattcagcctttctggtaaaatgtaataaatctcctctcttcttgtttaagtagcaaccaattggaattgttacacatttgcttcttaaatagagtccacctacatggtctagaaaggaagaaacagggtgagttctgagatcaaatcctaatttttaacagagagctcaaaatgagagagtatgtcctgctttggaaaagagatttctctaagcacccagaaaggacacaggtattaccagagaaaggattctgttccaagatctaaacttatccagaaggaatcaaaagcaaaggctaaaatattaaacattagggaatgcttccttaactaattaaacaccaatgcaacggaatattatgaaactctcaaaacttatctgtacacataaggcattaaacacactcacacacatacttgtgaaacagttaaatgcaaaaaacacagcacaaaacagtgggtagactatgattcagttctggaaaaatacagctatctgtgtagacacagagagaaaattacaagggaagtgtgctaacatgcagggaatgggggtaacttttttgagactttccttgaagttatagtcctttcaaaagaaatgcaaaatattgaggaatagaactatgttgtacatttatgttttaaaaaactcacaccaatgcaaatctaatttatttttcttttgcaggaagttaatctgaaacatatatggtcttatattgatgtattctaactatataaaaatacacaaagtcacctacacacaaatccacacccatagaagcttgcagaaggacaagcgattcataagcatcactggaatgggaagctgtttccaatcaaagacccagaaaggattgatgggagagaggacctacgatgtgcctagaactttacagcaagtttcctataggaatttccatattaacccttcaaagtacttagcattatccccatttgcagatgaggaagtgaggctcggagatgtgaagtgacttgccaggcatcacacagctcgtgggtgtggcttccacctcaccacactctgataggcaccagtgtcaggcacaatcagatacaaagtcagtgagtttggagcttttctcaattggcctcaacacctcctaactgtctctttgcaaagcagcccactcttaccagaacagcagcttcttcctctgccctcccccagtcgaaccctgcactttctcatctttgtatcccaggggctggcaccggccttgtcatggggagacacctagggaaagatgggcaaagagacaagaatttccaagtttcctctgactgctcccctgcaacacggagagcctgagctagcacaaaggtccccttccacatgctggccatcacacatctgtgggggagatgtcactgtggccacaaactccgtcgtctgtgatcgataacggatgactgatgtgagtggaaattttgaataaaggaacatgatcgtgccagagaagatatgagaaataaacatggcaaagcgggtcctcttctgcaggagcaggctcttgcctgtgccaggacctggcacataacatggtcacattaagcattgaataaacatttgttaaatggatggatggattatgattatcctgtgaatccacacaaatttggtagtaccacaggtatttcaaaatcgatgtgccacaatctgaattcatcatctccgcaacattctcttttctctcatggtccattggttatccaaccaggacatagctgccagccttgactcctccctgtcccccactccgccccatcctccctgtcaccaaagcctggcaagtctgtacacgttaagtctcaaatgtcgttaaacccctgtctttcccccaccctggaggccaccctcttggtcaggagagattgagatcacaagctcaggagtaggcatgcctgaacaagcatgtgccagctttacgccctttggtaaagcactcaacctctggaaacctcaggtttctcttctataacatggggcaaataatggttcctacctcagtagaggataattatgagagcacaatgtgacaagtagatcatcttccacctgacttaacccaaaatcctattactgagtctccctgtttcaggtcccaaccccttctccccaggcagtcagagggcccagtctgaaattcaagtctgttctctcactcctggtgtctagtgaaaggagcctgtcttttggagtcataaagtgtagattcatgtgtgcctaggaagcccagttatttggctttctcatgccctccatttatgcatctcaaagcatcaccaggcattgctgtatgctgagggttacatctgacagcacaagtgagagccttagcccaggacctggcacccactgggcactcagtaaagcttagctctttttcctctcccttctttcttgtcaggagagtgtaggaggaagttgggatcaaaccctggagggagaggtcccaaagggtggagaaagtgaaggggaagagtaccgtgaaagtcaggctggcagcccagcctgtttcatcaggacacccccagagagctgccccttgctgagcagaggtatccagtgagccatccatcagaagcactggcagtgctggtaaaatcacagcttccatagccccatcacactctattctctaaatccccatgcagtaggcctgggcatgacctgggagtcagcattataacatatatcccaggaggccccactgcttagctgggtttgggaagccctgctcagtgaatttgcctttgataagcagcccagaagcctccttaaactgaagctattccttggccatctttttggtagataaaaagtggcagcaacagggaatttgatttcatatggatggatttacattaattggagaaaacaaagtctagacattttgaaaaaccaagggacaaggtggccaagaatgctaacattgtactgtggcctttgggctctcagcacctgattagagaccaggacaaacctgctcaggcctggcctgaggccgggatggttctaggttgacttcgaccagcaggtgatcttctctcgagcctagaataacatcttttgtcagctgtctgatgccactcttctgtcttggtaccaggttaaatggcatttagagaaacaatttggcacctgaactctaatattggtgcttagcagctgtaaaaggatggtgggggggcatcatctagagaccccacggcaataattcttcagatcacatggagccttagaggctaccataactcaatactaaagaaggccacacagttgcagaaagggtactaagactttccaaattctgaccaggtatcaggccctgtgctaggccatgtgtatgtgtacttacataaatgaatgcataaatatatatatatatatatacacacacacacacacaagcatgtacacacatatacgtgtttatgtgtatatatatgcacatatttattttctatatatgaatatgtatgtgaatgttcatgtgcatgtttatattcatatatgtattcatatacatatgcaggtgtctacgtgcgtatatgtgtgtatatataggatatactgtatatatcttcacagtagccctcattatcaggcttattttagagttaagaaaactgaggtgtagagaaattaagtaacttcccaatgtcacaaagctgagtttgactccaaatgcttatgaaaccagtgtcctttctacactgcttcctctcctaaaaataaaacataaagaggcacacagcagttctagctctctggaatatgtgttgtaaatcctgggtacaatgactataagaatctccaaaacgtgccttactatatctaggagtaggggagacaagctctgggcatagccaggtagcccaggtgtgccgggccaaaagatcagagacccaattcccaagtaagcaaactgatgagctcactctttctccttcccaacctttctctgcctgccctatgttataggaaccatgtaatctataatagaacttttagactcccatgcatgcgtcggcttaggagaaggtgtttggatttaagagtctggagcaataatttccttttagtttccattgtaactttgaatagttacaaattgcctcattgtagattttaaataaataatgcatgtctctccaataattattcaagagaagatttgtttcttacctaccctgtggtctattacttgcctctggtattttaataatcttaatcatcatctgtttagcatctccaggctgctgtgctcactgcaaggtagcttataccttaaccctgacatgcacaataatctggccagtcaagttgcttgtcccactttcttgtctgtgtgtcccatgggactgtaagttccatgcagatagagttggcatagaaatggttcagatgcatggagccccaggacctagcacagtgcttggcacacggtaagcattccacatttactgaaggaaaggatgggtgaatggatggatgagtgctgggaggctgtattgtaaataacaaaagtgggatctgaaggaaggtatgggactctgaagtctgcattccttttaccttttgctatatttttctgtctcactattatattttgttttctctgggcctttttcttcagtcacacttttccaagttcatgtgtgctatttcttggactggttctatttatttagctggaggcagatttgcatttttaaagttcatgtgtttgttttcgagccaaggtcgtttttatgtgtgtcatttctctgggccttcacttttcacgttttatgaccatatccagaatttcccacttctccaagaagtaactgggtggttgggaggggggacagtcaagggtattggtccaatgggcaatgagatgtgggtgagattggggccagttcctgggaagcccctctgaggcccccacacctccatgcctccatggcctccatgggcacggatggcaggcccagcacataagcctctctgccatcatcccaccccaacccccacttggagaatagaggtcaggtctgctgtatcaactgtcctatcttgaatgctggtagttgtaatagagtgaacgagagctgtatagggtcttataccagcaatagatgcttcgcccagaaataacacatcacttccactcatatttcactgttcagctccatccatggggtcctgtccaaccacggggagccgggaattgtagtcccaccaagggcccagaaaaaaagagagacagaagtaattaatgaatagcaataataactgcacaacctccaagacaacttcccatcttaaaaccctcctgcttttctctcaccaccaagagtcccagatcagagcccctgaggtcatgagaatgcagcctttgccaccctgccagcctcatttctaggcctccatctccagtaacccagctgattaagttcccttggcaggccatgcatggcccttccacatggtcttcctgctgtccgatctgcccaggaactcattcagggtgactcggggcaaatggcttctcctccaagctagcctccaccaacatctccaattagagctgagtccccgtctctgcaatccttagtaacttgttcactgtccttggcattttaccctctctgtttattcatgagcatgtatcttccaccagcctgacccaagagacagtgactaagttctacttgtctcacaatgctcagacctcacagcacccccagtgtgagatgttcagcctacacctctcaaatatttagtgctgactactttgacaacacttattatttaggcatggcttatcaatttttaaaaatgttattaatatcttttacagtttattatttattccgtaactttccaaaggatgggccgtcttgatcttgctgctgcactttatgcctatcctcatggctactgggctacacagtctaatttgactttaagattcaggagggtggccaggcatagctcacgcctgtaatcccagcgctttaggaggccgaggcaggcagatcacctgaggtcaggagtttgaaaccggcctggccaatgtggcaaaacctcttctctactaaaaatataaaaattagcagggtgtggtggctcatgcctgtaatcgcagctactcgggaggctaaggcagaaggatcacttgaacccaggaggcaaagtttgcagtgagctgagatcaggccactgaactccagcccggacggcagagagagattccctctcaaaaaaaaaaaaaaaaaaagattccaggaaggtatgttgccgaaaagaaagtagagtgtcttatgacagacctgtatcacacccagaccaggaagcatcaatgtcatcaaagcatggatggcgtgactattgtcactatctccttcctatgctcctggaaggatgaatgtgtgggtggtgatcctgggagcctgtgcctggagaggagggagccaagtaaggctgtgaattagccaggactcttttggtacatggagcaggaaccctgttcaagccagcttacacatgcagggaaaatgatacctgagaacatctcttagaaaccaaggacataggtctggcacggtggctcacacgtgtaatcccagcattttgggaggctgaagtgggtggatcaacggaggtcaggagtttgagaccagcctggccaacatggtgaaaccccatctctactaaaaatggtgcgtgcctgtaatcctagctactcaggaggctgaggcaggagaatcgcttgaacccgggaggtggaggttgcagtgagctgagatcacactactgcactccagcctgggtgacagactgggaatctgtcttaaaacaaaagaaaccaaggacgtaaaagcatctgagtcataagagcaaaaggaagcagagacttgcatgacgctgggattcttctccctgcctctccacttctctctatatgatgccttcaaccttctctctctgacgatcagcttcctcctcttttccactccacaggctgggaaatacggtgtcagggagcccactgcttcacatataacaatcagggctatgaaagggaggctgcacagctctcttggttccaaatctgaaagtcccaggaaagaggcacttgggcccagttagagtcaagtgtccactcttggactaaccaactaggtccaaaggccagagtgccattgtgacctacctggtcccactatatggatggagaagagaataaaggtcaccaacagtgacagtggccaagaacccctaaagcttcacaggagagaatccgtgtaggcctggctcccaacaccagaaggacagaaagatggctgagcttgctgcataacaaccacgaggggaacttgtcagaaatacagatcccaggttccaggtcccaggtcccagtgagtctcactcagtaagtctttgctcctgcctaggaatctgtggttcaagcaagcatcccaggtaattacaatatattgtcagatttgggaggcattggtttagcttgtgctccaaatttaattttatgtctgttttattcctttctgctttggggtttattattctttccactttcctttcactaaataatttgtaccccttctaggttatttaagtagagacttaattcccagtttttcttctttcttactaatagatgccatcataagcaacagttttttctttaagtaccagcgtgacagcatcctataaatttatatgatatgctgtgtttacatccttgttctttaaatactctgttctgaatatcttccctttccatggcattatttaggagtgtttttaacttctaagtgactggataaccccttcttgtttatttctaacttcattgaacgaactgtagtgttagaatacataaagcagaatgtttctgtcttttcttattgaataaatgtctttgcatcatagtaagtaaaaaatctatccataaagatttcctgaaaaatctatctataaaaactcactggtcaagtacaagatttgggtgttgggtgttgtgtgttgctgctctaccccagccctcatcaaaaacaaacaaacagacagacaaacaaatcacccttaacaaaggccataaagagcaggtctttggagttgaacctggctgggcttctaacttgctctgtgcagccttagacaaacaattcacctcctcggagtccattcttttgcctagggaaatcatgagtgaagacaggcatgtactggacacttgatcttagtagcatcctctaggcagtgtttgccctgcaggaccagctgggttatttagaggagtgaagacacagagaggtttagaaggaggcacagtcctcagtatcccaggtccctggtgtgcatcacaatctttcaataaaatggagctgatcatgggtatgaaaattgttggtggaaacagacataagggttgtgcctacttagctgctatttggcgcatagaagagtctgagcatctttcccctctttctttccctatccagttcttctttattattttaaaaactcagctcagagtcaattcctccaggaagtatctgcccattctctccccagcccctattccacagcattgactcctgtacacacagatcagcttgtgttatttccatcatcattacctgatgcctcatccctctccacagctgtactcagcttcttaatggcaagtactgagagttatttagaggagagagaacaagagagagaaggatacccaatatcccgcaccaactgttgagtagggcaattaattgaagaacatggagatagtatgcatattgtcaaaaatatgtgatacttttccagcaaatatttatggtgtatctgctatgtgccaagcagtggacatacaggagtgaacaacagggtcatgattcctctgtgggaaatatggatttcccaagaaggtgatggaggcccagtcatgggtgaaatacagggtgctggagagcacttaggtctaagcacctcttctcccattgaaagggtggaccagctgtccaggatatggcttttagcatgagaccgcaaagataaggagttagcaatgcctggaaagggacaggaagaagactgttccaagcagagagaacagcaggtggaacaccagagaacatgtgagtgcaagaaaaggagtgatgtggctggatgttaggcagtgaaggagcacaaagagaaacaagcagcaccagaccagacagaaacttggttttgttttgtttttttgttttgagacaggatcttgctctgttgcccaggctggatgcagtggcagcatcagggcttattgaagcctcaaactgggctcaggtgatccttctgcctccagcctcccgagtggctaaggctgcaggtgcataccaccacgcctggctaatttttgtattttgttgtagagacagagtctcactatgttgtccagcctggtctcgaactcctgagctcaagcaatcctgccacctcagcctcccaaagtgttgggactacagatatgagccaccatgccaggcaaataggaacttgtgaaccatgccaaggggcttggagtttaagaacaagagggtcttgccaaagagttcgtgcagtaaacctaaacgagaaatggtggtggccagagtaagggtgggggctgggggtgtgggtaggaaggggtgaagagagatgtcgaggaggtagatacatggacttggtgattgattggtcagggttgaagagagaaggacagtccaggtggtccaggacttcagtggcatccttcaccaaagggaaaggaagacattcctttgatgatggttgcaaggatgggtggagatggaggcgaactagattcaggctagtcacattccatatgtctttgggacatgtgaaggagacaacattcaacaggcagttgactgtgtaacagtaataacaaaaactcaactaagccctcacaataacctcaggagaaatgaaactaaggtacagagaagttgagtaacttgctcaaggtcacacagcacatagtggcaaaggcagttccatacacagacattcaggttccagagctcatgtgagggctctgaaactcaggagagagccagccgggtccacatgtggctaactcaccaccgaagccacaagaacaagaatgatgagtgaggggaacgaaggggctaggcagaacttgaggaacaccaatgctagaggcctgggctgggacaggaagccaaaaaaagagctacaataatctgatcttcgacaaagctgacaaaaacagcaatggggaaaggattccctagtcaataaacggtgctggggtaactggttagccatatgcagaagactgaaactggacttcttccttacaccatacacaaaaatcaattcaagatggattaaagactcaaatgttaaaccccaaactataaaaactctggaagacaacctaggcaataccatcctggacataggaactggcaaagatttcatggcaaaaatgccaaaaataatcgcaacaaaagcaaacattgacaagtgggatctaattaaactaaagcgcttctgcacagcaaaagaaacgatcaacagagtaaacaacttacagaatgaaagaaaatttttgcaaactatgcatctaagaaaggtctaatatccagcgtctgtaaggtacttaaataaatttacaagaaaataaaccaaacaacccctttaagaagtggacaaaggacattaacagacccttttcaaaaggagatatacatgtggctaacaagcatatgaaagaaaaatctcagcatcactgatcattagagaaatgcaaataaaaaccacagtgaaataccatctcaaaccagtcagaatggctgttttttaaacatcaataaaataagatgctggcaaggttgtggagaaaaggggatggttatatactgttggtgtgagtgtaaataagttcaaccattgtagaaagatgtgtggcgattcctcaaggagctaaaagcagaactaccattcaactcagcaatcccattactgggtatatattcaaaggaatataaattgttctaccataaagatacctgcatgtgtatgttcactgcagcactattcacaatagcaaagacatggaatcaacctaaatgcccattaatggcagacctttgcaggaacatggatggagctggaggtcattatccttggcaaactaacacaggaatggaaaacctctgcacattctcacttataagtgggagctaaatgatgagaacacgtggacataaagaggggaacaacagacaccaggacctacttgagggtggagattgggaggagggagacgaccagaaaaaataactattgggtactaggattagtacctgggtgatgaaataaatctatgtaacaaacccctgtgacatgtacacagtttacctatataacaaactgcacatatacccctaaagctaaaataaaagtttattttttaaaaaacgaaagtaagtatgtagtcagagaaaagggtttctattaaatagaaaaaaagcttaattagaaatttaaaaacaatcatctctgtggagtgatggggtgaaatccttaaggcaacgagttgagaagtcagttgagattgaaggaaccagacagcaaggatagtccagagttagtgaaggggagatgaaagaaggcagcagctagaagtagctgcagggttaaaagagagttttataataacgaagacagtagattatattaagtattgatgggaaggagccagtagagatgagtttgaggctccaggacagagcctgtataatcaggagagtgaggttccttcctgactaggctccaggaggaatagatccacacatgtgcaaggatcccagtgtgaccgggaggagaaacgaaagacagggttgggaagagaatggggatggtggaagcaccagaggatccccagcctcactgagcttggacgctgcacactttctgcagcagcagttcatgcggctgtgtgatcttcctttgagagtgctgagcagcccaggtgtgactgaggcggtgctggacatttggatagattctgatctggggctttgctaggagagcaaaaccaaaggacagtgagccaagggaattgaaaatactggcactgaagtggtggaaagcatgttctgtgagctccagactgactgaaggagctgtgaatcttctattgtcatcctctgcccaacccatcaccctcccaccaacatatttaccacgggacttttagagtacagtcaagattcccttttggttttctctctctctggatatcgaaaccaatttcctgggatgggggtgggggaaggctggagaaaaatgacattacagagaaggatcagccttgggacattccccaggccagactcatttgaagaaaacttgagtttttcccttgtctaaagctctgaggtctttggggagctttccagctctggtctaattgtaatccctaagtacatatgctatgttccaaagtcaatatatagagttagtgcaataccaatgtaaattcttctgagtcctttaatagaatttgacagctctgagtgtaggatgcttattcttccaggtaaagaaccatcaaagcatttgtcttttaatggcagtgatagctgatccctcctgagtgattaagatgtgaattgtcaatcactgaaaccatcctgtactgagttaaaaaccacaaaggtcaccagaagagagattcctgagatggatttgaattctggcaaaaccaacgttaggccagccaaggagcatattggagaaagagattggtatttaataagcatcgcggggacagttggctaacaggccaggggagagttaatttaaattcatacagcatacctgtcaagttcagctatatcgtactgctaatctgtgacaaacctggagacaaggaactggcattgttacccctgctgctgataaggagataaattcctggctattgaagaaaaagataccatcagggctctgatagatgggttcaaatatgtgagaataaaaatgtttgcattgcaatgtaataaaaataaataccaaaaggaaagctacggcatccgttacgtctgtctcattctccctcccaggcctgcttactgcccaaaacagataatggataggccgttatgtgattcttcctgataagtggtcaaaggagatgaacaaaattaaaccaggaaatggagatagtaaatcaccacgtggaaataggcgcggtcttgccagctataaaatacaatttagatccaggcaactttcaggtcctgttacatgcctactaaagccacaaaaataagtatgataaaacccaggataggcagccagtggaaacacatccttcagcattgccttttagaaagactggacaaatttccataagcaatcaggcaacatgaatgagagccacactgctgttgagaggctctgacccggtaattccttctttggttaaaaaaaaatcctacagtgttagctccaaagaaagaaaaacacatctatagcagcattatttctataataactataaattgccaacaacacaaaggccaaacaagaaggggctgaccaggcaaagggaaatgtgttaacacaatagaataacactgtgctactatacatgactaatacggggggcgtggtaggttctggaaacagttttatgaaatatgcatagtcatcattagtgtgcatatccaaggccttcctggatattgataaagaagagactttggatggggcttaattcacttaatgttcattaaggtttcatgataggctggatgctaattttagtcattcattcaacattcattgagtgttgaccacacaccagatgctaaggatattaagatgagaaagaaatgcttcctactgcggagggctctgttgtcaaatgagaagatagacagacagacagacacacacacacatacgcaaaatgatcaagtgtgggaagaggtatagatagggtgtcatatagaaaggggagggggcctagacgtcactacagatcttcatatgcaggattaggataagtcacaggtggggcaaacatggaggagaacattgttctagggagagggaatggcattgcacaggctgtgaccgtatagatctggggtgtgtttgtgtgtgtgtgtgcgtatgtgtgtgtgtgtgtgtgtgtgtgtgttctccatcccaatagatctgcagtctatagcctaggatacttctttcatgggacccagaacccagtggctgccttcccagaaccaactcacccctgacatttcccttcactaccaccctcccacaaaccgctcctcccccgttcctctgccacgcgcagcctcacttccttgctgaaatcatgcaaggccgtttgccctgggtaaaaatgctcatgttgtgccgtatgctgtgtgaatagaattattctgaaggctggtttaaactggaaaggattcttgttattttatatagttcatatcttattcattgcagagtgttctttcctgaaagaacactttcatatcagaaaggagacgtagagccttaggtgaaatttccctgttactggtttcctgaaagtgctggatatggaaactgttgttaataaattgagtaaagtggggaaagtaaatgcaggaatgcaagcccccagctcaagttcatattaaccaataggtggtgtgcggagtgtcgtgagtaagaaatcatggcagcaggtagccacaagttgccatttgaatgttgatgttttgaaagctgtgggtgctattatagcttaacatatagtttgatttgacgatgtgtagcttagcatttagaacgtagtgtatgcaagagaggaaaactggaagcttcggaaagggaacgaggacatgaatcaagaggttctcaggtaagaatgacaaaggaagaggcttagtggaatggtgtgattaccagcacatcagcatgaactcatgactttgaaaacaaatccctctctctgctgagatgacctaagctgccgatagcattgcctagcacataaccaggaagcaagcaaagcaatccaaatgaaagcagccctccctcactgccattctcagaagaccaggaatagattcaggggagaaatcggagtcagaagcctttcatggttggagagatataatgttttatgagaccaataatgctttggggggccatgttgcacagaagtgggggtgagaggtgcccacctaagaagctagcccccacttgtggaagttgtcacgcagcaacaagtagaacttcaccttgagcaacaaggcaataattattgccagctgaatgggctaagagtctgtgaaagatacttgaatctgagatgatcctttggaaatgaacgttaatgtgaagtgagctgccaagattgagtaacaacagctgaagtgttgttaaccgaagtcagaaaatgctatacattgatcacactgtgttatcagaaatccatcctccagtttcagtctgtctctgagtgacaaatcacactttctctcaccctacaagcctcagacctcctgagcagttgggttgaaatttcataatgtatccagatgattctatcatgatgtctgcaggttatgtgtagtgtttgtgtgtgaggagcaaaaagtggggtgcactgatccaaaaattcttctccagggcttatgccccttgcctttgccttgggagtgattcttggtaaccaggggagggccttgtacccggacttgagggacggctggagaggagtctcaatgggaggcccacccagccaaccatgagagaccctggtacacatgttatcagtattctctctaatatgccagcccagttgcaatggcagatgatcaatggattgcttggctgcctggccaccctctagcccacacctttcttctctggacatggactcatactttcccttctccccttggaatggtcccttttcattcaggcttggaatttggattgagattgtgcgacaaagactgctctctgctcaccaaaatctgtgctccctacttcttcccagctgcatagctagactgttttcccagcctctctctctctttttttatttttgagatggagttttgctctgttgcccaggctagagtgcagtggcgtgatctgggctcactgcaacctctgcctcctgggttcaagtgattctcctgcctcagcctcccatgtagctgggattacaggtgcacgccaccatgcccgactaatttttgtatttttagtagacatggggtgttaccatgttggccaggctggtcatgaactcctgatcttaagtgatcctcctgcctcagcctcccaaagtgctgggattacaggcgtgagccactgcacccggcctgtattcccagtctctcttgaagtcacatgtagccttgtgactaagttctgccctgacccatgggagaggagcagaaatcagtgccacttccaggactgccctatacacaacccccacttgactcctctttgttcgtattcctctctgggctgcctgaaataaagacaaccttggggtcaccttggaagcccttagctaaaggtggcaaagcagccagcagcctgggacccagagacaacttgaaggacagtgccctgctgacctgaggcaagaaacaagcatctatagcagaataaatcctctcacataggcaagaaacatagttctgtagcatctgagcctctacattgggttctatttgttacagcagcaagaattaccctaactcactcagatggcaaacagtttaaactgtggccatcagctttgactctgactgaatccttctttgctgtgaccattagaaacatgatgctattatacacttgggtctcgccagccagggagaattggtggctgtttgaatggcagcctcctcgggctacagaaagaaaaacatggtgtcacacaaaatgctgtaggaactacaagacaagaagatccatccctgtgctacctgggctatgatctgctaggcccatatgagctgcacgctgtcccaaaggtcaagaccagctctgagtgactgggcagcagagacagggaaggcagcttgctgggaggcccacccagccagctcaacagcaggtgccattttgcttgtggctggcgtatagagttctcttcttagaaagggaccatttcagttaaatgtaataaatatcctcttaagtaacacatagttgaaattcttattttgctttcagggcctgaaattggttaacagaacaattcacataagtcacaaagtaggggataactcagtacctggactggagccaaattcccctggagctgtgcagcattttagagaggagacctgggtagcctttatggggacttctctttgggataggagggggatgtgtttgcaggactcttcaggtccaaaatgctgtgcttctgagacaagagtctttccccaaatagagcggcagctgttgttttgtgtttccttctccctccaggatccattcccttttcttgtaactaatgccccacacacgctttgcaggaatcacctctcctaacctatgggctctgggacaaatgagctaaccccagctccacgcacaaagtattttatccaagctctctgagcttaaggtgaggccatgtctctggtgattgattatttcaggagagagtgagcaatctaagttagtccaatcggagtgaattctggggcttatgtaggaggtaccagagagaaaactttgctcttttctgcaggcctggaaacaggcacgctgaaactgatctacaaccattttgccagtatgtagggcttgaggattgagccaacagaaccaggctgagaggcagtataaatccaggccctgatcacattacttaagcacatggatccagttacacctgaagctagagacttttcaggttattgaaccaatacatttcatttttaatcaatataattttggaggtaatttttttttcactcactttcagtggaaagagtgtcctggctaatgggacaaattttaatggaattgtcttgggaaagaactcatgggttctaagggagtaagtgagaataagaaatcatcatagacttcaggaaaggttgcagaaagaggaaaggggatctgttagctctctgcctaggacccccacaagcctgggtcaaccatggcagagccaaccataagagaccctggcacacatgttaccactattctctctaatatgccagcctgtagacatgttaaaagtattctctctaatatgccagcccaggaaaattatcctaaacattcaaagccatcttacatgaagctgttctttgaagcattgcgtgtaacagtgaaaaattgaaaacagtctaaatgtccaacaatcaggggtcggttcagtgagcttgttgccttcagaacagcatttatgaagtacgtgtaataacatggaaaacacttatgatagtgtgagtgaaatcaggatatggagaatttgtacagtcagtatgaactcaactatgtgaaaaagggggaaaaaagaattacaagcaggcaaaacaaagaaaagtaaatgtacccaaaagttaatgcttggcaagcgggataattttttctttctactttgctttattttctaaacttttgtaagtgttatttttacaatggaataaaattctgcgtaatgttagctgttggcgatgttgtacacagacagtgtaatgtacgtggatggatagtttttgaagtaaaggaggaatgagggtgtatgactgctcctctgccaggcatccaatcgggttccaggtgtttcactgtagctggatgacctgtggcaaatccatttgtctctccagacctcagcactctcctctgtcaatgaaaaggcttcagaatagatgtcccagaaacagacccaaataatatcataatgtccaggttctgcccccgcatactcagccttgtacttgcccaaggaattcacctctctgaacttcagtcccattcatggggaccatctccccactttgccctgcctgtgggtacacactctttaagctgtaaatcactatacatagctgggagtttgtcttgttagccatgctgctcccgctcaggcctgcctcagcccatctgctgtcatttctgcccactcgagttaagccatctgcaaatagcaagagagtgttctctctgatggctcttggggctgcgccctttctgctttttctgtggcaaagcctgtttgccctctctccagaaacacggctgggcagacaggagccctgaacagctccctcagacatgtaccaggctctctcatgcttggctctgccatggttgacccagccttgtggggggtcccaggcagagggctaacagctccttgggagtccacagctgtatggtccaatacagtccatagatttcagcagtggtcttgatgacccatgccccgaagcactgccttctctaagtggatagacttgttctcatttcattaaagacccaggtcctgggaagagaaagtggcccctactagctgatcactgaggcactgagtcatgacaatctggctgcagaatccactcctcaagggggttcaggattagaatgtgcaagaacataggaggtgagagcctgagaggcctttggagacaatctggtccacctgctcctgggacagatggagaaaccaaagccagaaagagctgtgatgtgccctaggtcacatagctgtcagcagcagagttcagacagaagcccatcctcctgcctgacccctacccctggcttgtgcacacaacccaatcattacctctgtctgagagggtaggaggaggaaggcccagcagaggcccagagaggccagatcatctctccaggcctccgtgccttggaagggagagttctcgtgtctccttatccctacccatagcccttggccctattgtctccagtgcttcctgaagactgggattatgggaggcaaagcactgggcgggttgctctagacatctgcccctgggtctttatggcagcctctcctctggcctctctgaggcaagactattcttcctcatcctgtttgcccggagcctgccgggcacaaggtggccatagattctatcttccaaactgggacacattgaagcccagaggggactcaatgaatagttatgcgggaacaccttgtgtaaactgaggctgccccagatacacctggacctgtgcttttcctggccaagccaggttcttttgtgacatgatttgagtaatgtttccatcatctattttttcatccctcttctttctacctggctaatctctactcgtccttcaagacaagttgaaacctcacagtttctaagaattatagccttccttacggcccaaaaacaagtttaattccttttgcctctgcatccaaacggcttggctaatacctttattatagcacctgacaccttttcttggatcacagcttctcaaccctggcacttattgacattttgggccagataattccttgttgcaggaagatgtcctgcgcatcacagaatcttttgtaacattcctggcctctacccaccagatgccagtagcaacccaccctacccccatctgattgtaacaactgaaaaaatgtctccagatactaaccaaatcatccccagctgagagccactgtctaaatgttgtgtttgtgcgtctttttttacactatgtggtgatttctgagagagtattttatcatcttctgtgcttgtcagttcccagcacatagtaggtgcttagtagaaactgtctgctgaatgaatgagtgacttgaacaagaagaaacgcagaaaggtggctagggtgccagctcggttggatgcattctcagtcatgaccactagagggcagaaaaggcctgccaaaagcacacaacggagtccaggaaagaggagatcccaatgccagagccaggggtccttgcctggctcttggggctgcggtgacagggccacagtctctcctgctagttccttgtcatctccccgatctataaatattgctgttcccagggctcagtgctcagacctattctctatttcctatctattctccttgtgtgttctcatctaggatcatgattttaaaaatcatctacatgctgataactcccaaatttatatatctagcccacacatctcttaaatgccatacatgtatttcaatcacctacctgaatctccatgtgaagatctaattaataggcctctgaagcttaacacagccaaacttgaactcctgggatccttcccttccctcctccccaaactcactctatcccagtccttaccatctcagcaaatggtgactccatccttccaatggtccaggcctaaaaccttggcctcacttttcctctcactaacctatattcagtctgtcagcagatactccaggctctacctctaacccgcatgagcatcttatctgcgctaacaccttggtgcaggccaccatcatctgtcacctgggctatctatggcagcagcctccaaactgatcccctgatttcacctcttgccctttgtctattctcacggcagctgaaggaatcctaagccatgaggactctggtcctaccacttctctagtgaagagtctgctaatggcttccatctctctcagacaatgaccaaaaatcttacaaggccaacagggcccaccatgctccactccctccatcatcgcctctctgacatctccaacaacccccagcccacaccccagcatgctggttccctcttcctccagacacgccaggcacaagcccgcttcatgtttattcctgatgttccatggaccttccccagcttcccctcccagccctgtttcttggcttattttcttccatagcagttatggcaaactgatctactagatgttgtagtttcttatctgttgcctttctatgtccaattgtggtctcactagggaaagggatttttttttttagtctaatttgtccactgctgtctctccagggcacggcacacagtaagtgatcaataagtagttatggagtgatgaatgagtgaatgaagagagtgagttccgacaaatcctgagtttactagggagaaatccagtctcagcccagttggctttcctaagaagatcttccaagaaagagttgactttgtccaaaacagaacagagaatttccctggagtttgagaaaagtggagggagggagactgacagttattggacacctattagggttaagaggatggactctggagcccaacacattgggcttaaatcccagtttcaccgcttacttcctgtgggactgcagttaagtccgttaatatcttcatgcctcagtttcacaactggaaattgaggatagtaacaatactagcctggtagggctgttatgaggattaagtgagttgatatatgcaaagcacccagaataatgattgacacttagtaagagctctctaaggatcagttaccactgttgtgtgctttacatatcccatttgatgcttataataatgctgttgggtaaataatgttactagcccattttgcaggtgagaatgttgacactcaaaggcaaacagttgcttatccgagacctcacagctagtgagaggtgaccgcagtgcagctctttctgacttcattcccatcaaaaagggtgtgggtgtcccctgagcttctccttcctctcatccctcactctgttttctgctgctgccaccaccatcaaggtggcctgtgcttaacagcccctgctttttaactcctgcccaagggagaacacaaactctttccgactctactagcaccagcaaagcaggctgcatcttaaagagaactgtgataaacatcaaagcagccagattcctcaggtgggggattctgatcctaagctgatgcccccctcatccctctgtccccaggaagaagagaccaccagcccacaggcagacagcacctgtccctgctgcacttggtacccatccccttcccaggcactccccggccaactgagattcagtgggtccaagagggagctggaatcagtattttagcaggctcccaaggcaatttttgtcttggggaagtttgaaaaagactggcatagaccttaagggcatggactctggaatgaaactgcctagagttcaaactctagctccatcctttcctgtgtgaccatggacaggtttctcgacctctctgaatttctattttcttctatgtgagatgtgggtaataaaactgtctagcttatagagttgagagaggattaaatgaaatcatgcatgtaaagtgcttaacacaatagccagcactcaacaaacattattatgatcaatattgttgtttttagtattatccaaagtgaagcagcctagattttcagattcccttggacccaaagttcagtgcaggtgccttcacacctttggaggggggggagctgacacacaccgtcactctggtcatgtctccctggacctcacagaccccacataaccagaactgcacatgcagtagggtgaggggccagctctgacactccagcccctgcactgaggtgggaagttacacagtagggtgaggccagcactgggcccagagcctggcacaaagcccaggtgcctgggagggcctgaatagcacctctttgccttagggagccggggctagatgctgctgactggctccaaatgcagcctctttacctggagtcacacagcccttcagaaaatcagaggtgctccccttcctgtgtccatgtgttctcattgttcaattcccacctatgagtgagaacatgcggtgtttggttttttgtccttgcgatagtttgctgagaatgatggtttccagcttcatccatgtccctacaaaggacatgaactcatcattttttacggctgcatagtattccatggtgtatatgtgccacattttcttaatccagtctatcattgttggacatttgggtcggttccaagtctttgctattgtgaatagtgccgcaataaacatacgtgtgcatgtgtctgttgtggggtggggggagcggggagggatagcattaggagatatacctaatgttaaatgacaagttgatgggtgcagcacaccaacatggcacatgtatacatatgtaactaacctgcatgttgtgcacacgtaccctaaaacttaaagtataataaaaaaaatcagaggtgctgaggctcagaaggtgctgacccccgctttgggactgcgtgacactcggaaagaaaacagagaggaactgacttcctgacgggcatggaggccacctcctgctgcctccacccccagggtggtgtgctctgactccgcccctccttcaggaagggcagaggtgaccacttattggggtgagacagtgcagggcaggcagccaggtggagcaaaaagagtctcagacagggagtcagagtggagacggagggatggaggatcagagagtgcgagagggagaggaggggaggaggaggaagcagccgacgcccagccccagcccggcatgcaacactgcccctgcagcctgcccgcttctctcctctgctcctgagaacgcctgccattcgctgctgggccatcctctccctctagtccaggcggttcgcttatgctgttcccttaacaggaacccgtctcctcgcaaaccctcttttactgacttggctaattcctgctcgtctctcggatttggcctgacatcacgctctggggagcctccctgagtgctgcctcccccggtctggttgagtctagtgggcgaccccagcaagctgtacaccagacaacccctgccctgcccccataacagtgtttcctgaggaccagaaccacctctttgcggggcacctcctcactccgcggagaagagatgtgctgtttcccggcctcatcccagcacctcccagagcctggcgctcctagctactaatggaagttcccagaaggaagccctcgccggatgccactcacctggcttctcagtagcacctgagcctaagcccttcctacaccgcaggccacattccctctgctgctcgtcccaccaagcccccaaacccaaagctgcaacccctcgaattctacacaagtgagctaaaggcgggggcgggggggggggtgtcccaaggtgggggaagaagtgacctaagatgcaaggagagatacctgagacccagggaggccccagggagcagctgggaacatccgggtgagagaaagagggtgggggaggagaagggcaggagcgcaaagtgaccgccagctgaaagagccgatccgcagagctgcagccagcagggcctggagacatcagacctggcaactaaaatgccccatgaatatttaacagccgtcaatatttaattagtgcagacagattaactctgaaatcacacatacttgggctgggctccccaactcctggagggggagtcagaaggagagggatgggcccaagggagaggctctgttcatcaccatatggcccctagcctgctcaccttcccctccctaccacctccccctgcaaagagcgggcaacactcacaaaagtcagaggggcagcgacaccctgaggagccaaggggaaggtctgcatctccagagggttgggggtacggtggggtgagggcagtgccgggcagaggggccaggtcagcagctgggcgggaggaggtggcacagcagccctttccaccgcagctccaccagctcagccgagggtgggctccacatcagcagccccgcacagagcctgccagaccccagcctgacttgcaggagcaggtgtcatggtgtaattacttctgtgcctgtgccatgcctggattatgctgtttattgcatcagcagtgggaccaagagtctttttattctcttcttgtttctttgaggtttatcacatcttgtgccacttttttatttaatggagtatccctggacttcatcatctggtcataaattgccacagttgatgtcctttttttttttttttataaaaaacatttggcccaggacttgtaaaatgtcctagccaggcctgggctctgcccgcctctccatgctggagtttacattccagcacaaagatggtcttaggttccacaaacaacccagcttgctttatgaccttgtgcccttgtgcatcctgtgtgttccaccttgagcaccctaccccttcctcctactttaaggtttgactcagaggcctttttcctccaggatactttcattgatgtcctatctcataacaatttgtttgctttcctgactcccccaggatgagcgcctcaaagacagaaatcaaaacctgtacatacatcctgcctaaccttggaaagggcacctagtgggtgctcagtaatcttcttttaactttaatgaattaaagtaagaagagatttcagatagggactggagaactgtcaaacacattgtgtagacggcttgtgtatccgttagctatggccgtgtaacagccacaaaagtctcagtggtgcatataaattagccttcattctcaaaggtattcaagtcagctatggcttggtgatctaagttcagccaggcaattctgcttcaagccacagccctgcttctcgctgcaagatggagggttgactggaaaagcctcctccaagcatctgtcacccaccctgggctggtgggctagctgggatatgctcattttatggcagtgggagaggtacaagaggagatgcccaaacacataaaagcttctgtcatattactaacatctccttgaccaaagcaagtcacatggtcaaacccaaagtcaggaagcaaggaagtaaacaggacatgagaagacatcatgaaaagggttaggggagggggtgtaaagaaatgggccagtatttcaactgatcacaggtgggtccccatcaccccatgcacaggatcccagaatggtaggaccccagtgggacaggaaagagaggaatgaatgggctcacacttgtagtctcatgagcttctccttctcacctcctccccacccttttttccccgggcatctgggttaacaaaacagcaacagagacaaaataagtttatagaagacactaatgtgagccacaggttatggtaccaaaagcagagagaaggggacagagccgatgctgagaatgcaagccgaagacagacactggatggtggaagatagaagccagggaccaggacaaatgatgacctttagccacacagtgcagggaacaaagccttagccctcaagtcagcaggcctggctatggctgtttcccaccggtatgataaggactttggactctaagaaactgaaaaccccgatgaccctgatgtcatgattcctcaacctctgcctcgtttctttctcctcaacaggcacattctgaaatcttctctaaacccctcacagtgaaaataagaccaccctctgtctatgtcattagactcccaaggcttcaaggcaaaaaaggattgtcagaagtaggtcattggcaggtgggtggttgtctttccttctgagatgtggaatccaatatttagagtcagaataagcagctggtagatggaaaagaatcctcttcggaatcagaaaaatacgggttcaagttctggcaccaccatctgctagttgagtcatcttggagagtcacataaactcttgagcctcagcttcactgcctgtcaaatgggctgatcatagtaaccactcggagctgcagaaggggtggggattaaatgatagaaggtgtgtaacacactcagcctggtgcctggcccaacaaaggagctcaacctatatcatttcctctcccttttctatccccagctcctgaatcttcattgattctgcctcccctgcccccaaatctatgaaattaaaattcctgccaacagtttaataatttcctcagctaattcccttcagaccccaaggcctatatccggacatggtgatttggtccaggtaggcgtcatccaaatgttctaagtattctctttcctacctttaatcaactatattgacaagccttctgtccctttctaattgcccatccctaggatttttttcatttccttgttaaagaccaatattacaaagcacttcagcagctcagccatttttatcatcatcattaattttatttcccttctcatttattaatgggccaggcggctttcaagtatctcttttcccctgatatatttgtaaaacgcccttcttattccctttggaggccccaaggctctctgcagcttttatttcttcccttggctgcccttctgtttctctgaagcctttgctgactccagatcttccttttgtgccccccgcccaccttcctcagccctccacctctcctccctccctccctccctccctcctcagacttggtcggaggcctggtctctaagcctgtctctgtgttgaggcccacatggctctgagagcaccaaggatttgccaagctcctgccccatccctattctgctcacactctgtgagcagagaggagcttttatccatgtagctgatcaggaggaaaggaccagaaaagcctatgtcccccttttattcccgcccaccccacccatccccttacctcccaggactcctgattaagggctctgtacacaaggggcatccattcattcatttacttaaaacaacatcattgagatataatttacatacaatacaattcaccatttttctttgtttgtttgttttgagacagagtctcgctctgttgcccaggctggagtgcattggcgcgatctcagctcactgcaaactccacctcccaggttcacgccattctcctgcctcagcctcagcctcccaagtagctgggactacaggtgtccaccaccacacctggctaattttttgcatttttagtagagacggggtttcactgtgttagccaggatgttgtcgatctcctgaccttgcgatctgcctgcctcggcctcccaaagtgctgggattacaggtgtgagccattgcacccggccacaattcacccatttttaagcatttaattattaaatacaatgattttttaggaaatctaccaagttatgcaaccatcaccaaccatccccctttagaacatttttatcaccttcatttacagttaattcaacttctcacctccatccctagatgacccctaatctgctttctgtctctctagatttgccttttccaggacattttatatgagtggagtcttacaatatatgtttgtgtgtgtgtgtctgcctactttcatttagcatgtgtttgagattcatccatgttgtagcatgcatcagtatttcattccttttgattgttgaacaagatcccacggtatggatataccacatcttgtttaaccattctcctgttgatggacgtttgaatagtttccattttgggcaattatgaataaagctggtgggagtatttgcatacaagtctttgtgtggataaaaggcttcatttctcttaggtatatacctaggagtggaattgctgggtggtatagtaaatttatgtttaattttttaagaaactgccaaactgtttttggaaattggctgcaccattttacaatccagccagcaatgcgtgaggatcccatttcgtcccatcctttctagcacttgtcattgtatgtttttttgataatgaccactggagtactatgaagtggtgtcttgctgtggtttcgatttgcatttcttgatgactaacggtgtcaagcagcttttggtgtgcttaattcattcattgtctcaacgaatatttgtggggcacctcatatgtgccagaactgttctagggaccagtgagcaaatagataaaattttgcagggcactcatattcctgttggagagacagacgatacacaagacaataaatacatacagtatcagataaggacaactggcaggccagggagaaaaaagattaagcagtcaaggggtatataaaatgtcaaaggttgaaatttcagggaaaggagtcacaaagacctcactgcatcaagacctgaagaaagtgagggaggtcttcatgggagcatctgggagaggagtgattcagggaaacagaacacattccaaaggccccaaggtagaagcaggaccttcaaggactagccaggagaccatgcgtgagaaaaaaaaaaggaagaaagtaccacgcgataaagtcggagaggaaagagggagccagaccttgtggagtctgtaagtcatggtaaggtgtgcatgtgtgcatgcatttgcacgtgtagaacagagaaagaagggaagtcactgaaaggtttggagtgagcaatacaatctggcctgtgtgttaacagagttgctctgatggagaatggaccatgatgctgggtgcagggacagagtagaaactcggacggtggggagatcagttaagaggctcttcggtgacccacagcacagagatgatggtggctcagaccagagtggggtagcaggaatggtgggaggtgcttggattctggaaatattttagatgcagagctggcaaaattagctggctgattatagcttgggagaaaaagagaagtcatgaatgaccccaaagtgttcagcctgagcccccccaaaaatggacttgccattcactgagacagggacaatgcaggaaaggcaggtctggaaaggcagggtcagcagctaagcttagggcacgtggcatgagacgcccagaaggtggcctaaagagatgctgagtagaccgatggatatacagatcccgagctcaggcgcacatcctggaatcatcagcgtatagctggcatttaaagccatgaaacacagcaggctgggaatcaaagaattatttcattagtatctgaggcagtgctcaataacccccatggaggtgtttctgggataactgagctggagagcatggctgagcctggaggtctaaccagactttgatttcctcttctgattctgaaagcaggcctgaattattcacctgacatggggtctagaggatgaggcgaggccttcctcttggggacctgccttgtcttcttgccaactttatatggaactcagaaatagggcctgccttgggatgtgtccatgaggattgctatgggctgaactgtgtcctcagtccaaattcatatgctgaagccctaatcaccgatggaactgtattcggagatagggcccatagggaggcaattaaggttaaatgagaggattaggatggggcctgataatataggattcttgttcttataagaatagacaccagagctcattcgctctctctctctctctcccacccttcccatgccccccaccccccacccctcaccatgtgagctcacaggtagaagactgccgtctgcaagccaggaaccaaatcagccaggaacttgaccttggttccccagcctctggaactgtgagacatgaatttctaaggtttaaaccactcagtctttggcacttagtgacaacagtctgagcagtttaagacaaagacacatgcagccccacagggaatgttacacctaggtggcagcatatctgcctactttctaatgttcccaggagagtccagaatttgacctgtcactttacaactcctcttcctttgtggtggaaggagggaaaggaaaagtggagagtgagaagcaaggttgcagttctttccccagcaaaactctctcaacagaaagaaggaaatagggggctgggcgcggtggctcacgcctgtaatctcagcactttgggagaccaaggtgggaagatcacaaggtcaggagatggagaccatcctggctaacacggtgaaaccctgtctctactaaaaatacaaaaaattagccaggcatggtggcgggcacctgtagtcccagctactcgggaggctgaggcaggagaatggcgtgaacccaggaggcggagctggcagtaagctgagatcgcaccactgcactctagcctgggctcccatcgtatgtaacatagcagtgttactaatgttactaggtcatatccctaactactattgttactagtgttactaggtcatagcccctaccctgcccaggagcacatgcagcctctgcacccaggcttctgaccttgcaccgtccaccagtaatgtaggaaggccatagcggatgggagcccctgcactcctcactctccattaacactctttcatggatccctttagcatccaccatgactgatctctctaacacatcctccttaccttgctttttgaacttggctctcatcattgaccttcccagccctagacatttggcagcctcttgcccatgattttgcttttcccgtatctgagctgtctcaggataccttgggaattcatcatctttctcttccatccttctacccttccactctttcaccagccatgcactgaatatttgtgcccatccgccaactcacccccttcaacttatgttgaagccctaatccctgtgtgatggtatttggaggtggggcctttgggaggtaattaggtcatgagggtggagccctcatgaatgggattagtgccttgataggaagaggccaaagagctcactctccttccaccatgtgaggacacagcaagacgatggctgtctataaacaaggataaggcgctcatcaagaacccagccctgcggcactctagctaggacttccaatctccaaactgtgaaaaataaatgtttggggttttttttttgtttatttgtttgtttatttgtttttgagacagagtctcactcttttttgcccaggctggagtgcagtggcatggtctcggcccactgcaacctctgcctcctgggttcaagcaattctgctgcctcagcctcccaagtagagtagctgggattacaggcacccaccaccacgccgagctaattttgtattttttttagtagagacgggattttgccatgttggtcagactggtcttaagctcctgacctcaggtgatctggcccgccttggcatcccaaagtgctgggattacaggcaggagccaccacacccggccaaatgtttggtgtttaagccacccaggatacagaagtttgttatggcagcctgagctaagacacccccctcctcttcacacccacctccccttcacactcatcacctaatttgagcctatggggttgtgtatggagtctttataggactgaacatgcttcaaaccaagtcatcatacagacacagaaaagcaaaaagatatgatcttgtaaaagaaatgtctccttctcccaaattaccaggtatgtggaatataatatatgttaccttatgaacattttttaaagattattaaatttaaacacagattgaggtatttgaatttcaaagactatctgtacaaagcaaacaaaaaaaaaaagtcccaagattgggaaaggagttgatataaatgataactgacaaagtacagccccgtggttctcagactagaggattctgtagttcagcaattttttttttttgtaacagcaaaaaaggaggttgacagatacatcattggtatgaatggagaaggaagaaaataaaagtcataagtgtgaatgagatgacagttaacaagctaaggagtttgttgtggtttatgtatatacttttaagttctgggatacatgtgcagaacatgcaggtttgttactatacattgatgggtgcagcaaaatctttaaagagaaaattggaggattcacatagcattaccagctttatgcagttctaagtgtagatacccgagaaatcatctcaagtctataatcactatcttttcacgggtgacaggatattttcaaaccaagaaagcaggaaagatataactccagggaaaggacaatcctgttgataatgaataaatttaactttatgaaagactcactcatgtttttctcatttctccacaagctgatgaaaactttggcacgaagcactggaatgccgaagttaaacccatattaattcctacaaaatatgcagtctcgtaagtcttcgagcttcacccagatgctgtgttgccttttagaatctgcatgcatgttggaaaggtcccttgatgacagggagagggaagggagccctaccttgccctgggggtcttctttcctttaagaactgattccctttggattttttcatgggtcattattcttggtcttcccaagttgcaaacaagctatttttccatgacaattttcttttctttcacaggtttctgataagacccaacattctaagtcactggttgctagctttccaggaataactacttcttggcaaacattagttaagttttggattaaggttaagctgctttctgttgggttccgcatgtgtgtcttagctttagacaggcaaacacctagttctccattcccacgattcttattgatctatgctatttttcaccatgatccaggttgctgttcataagcgtggtcagcataccttcctggagaaaagcacacagtgggagccaatggtatgaggaaggaagttgccttagagtttacaaaagtccagctgtcacagaatgatctgattgctgagtcagaagggatgtgaaactctctaggtctttctgggcccatgaaaaagaagcttctgaactgagaaagtggacccggtgtgctctagaagaggtcaggcttctgtgtgctccatcccttgctccactggccgcaggagtccagcaagtcacttaacttgagtaaccttggtgttagcacctctaacaaaacacaataccacccgcctcttgggccatgtgagcatgcaatggagttgcacacaggctcactgacactggcctggtcccagcatgggctcctttctttccttccctgttctcttgattccaggggaggctgcccaggcagagcaaccttggagaagagagacttgttaatggctcaaggccaacatctagacaaagatggggaagagtcaagagtatcatgagtggcttgtccctgggtctgcctcgcttgtcaccaggctctgtagcactgagttggttgcacatacctgcctcctatgctgaggttctcctgtgatgcagggaggtccctgcactaactgcatgaacttgggtcaggatggtgccctcctgcttacacacaggggctcctgcagggcagatgttaccatcatccacactgcatacagagaggagcagagaggtctggaattggcccaaagtcaccagctgacacctgagagactccacattcaaaaccagggttgtccttatcccatgcacttcctgtgtcaccaccacctaggaaaggagaatctacgagagagaaatgacctggtggggagagccctgtccccaaggttgcaggccaaggagagaaacctctgaagtgttcaatgtgtccccaggttgaatgtggggacagggtgggggaggagttccttggggagggtgctatttaggtgtagaatcagacataagaggaggttgagatgtcagggaaatgatgaagggtgaagaatggaagtcagaatctttatcaccaccactttctctcctccctctctccacttcctctccctgtttctgtgtctccccttcttcctccttccatctcctacctcctttccctcttcccccccttgcccttcctgctccctctcttcccacaagcaacccacacacgctcctccacagctcttcctccaccctcctctgcatggcctcctcctcctgctcaccccttggccccagagagcattctgccaccttccattccttctgtcatcttatctcttctaataattgcacatttccttgagacaaattcgaaggccaaggagagataaaatgacttctcagtcagtaaccccccgagcaagtttctctaaagtatgctttcttgacaaactagcaggccttgtgttctttgtgatttcaaaagaaagtaatgccacttgtcctcagtggttacagaattaatccattagtcatcactgagtgccaattatgtgcttgacactgagcagggcactttacctctacagtggcatttaatccttccagtaatccaggaagcctccctcccctcattatacaggagaaaaaacgaggtgcagagaagttaagtgatgtgcccagcgtcacaaaacaagcaagtaatagagacaaacatagaagcagttaattaaaaagaagtttctacacgctatcattgagctgcctacaaggcatccagccaggaccttggatatgagcaacagaagcattctagttcacttaagcaaaaggaaacttcttgataatctatctaaggctcaaaagaatctgcaggaagcctggagagtccagcctggacatgggtgggaaccagggccacttggaaggccaggtatgaaaacagggaaatcaagacctctttgtcctgggccctgtgctgtggggacatgagctccctgtatttcagaagcttgatgcctccttcctaactccagaagacagctatgcttgttcacttgctgtccttttggtgatagaatcacaggctccaggttatcatcctatcagattgtagctgatggggaagaagtaactccccaacaaatttctaccagaagggtgacacagagaagagagcatcaagtagcttggggcagggagacacagatgacagcaggctttacagaacagcaagtcttaaaccaaggctgcaaaggggagccatggaatcctaatgacagctcactgggagggcacacacattctaaaaaagctgagctgagcctgccccacgctttagcacattccctcctcccagtaacctgttgagacagggactgttagcaccccattgtagagggaaggaaactgaggtgcagaaagctgaagtttcttacccaagaccccacaggtataagtggctgagctggaattcagtccaggcctggctgactccagaatctaagcacttaactgctctgctagcaaatattgcctcactataacagagcattacacatgtcaaagtgctctaagatccattatctcagttcacactgcaaccctgcaaagtagatagggcaggtgtgatgatgcacatttcccagccgagcaaatggggcccagagatgctaagcgacctacagaaggtcacacagctggtgaatgagagagcctgccctgccacctcctggctcagcaccctccttgctgctaatatactccagaggactctgagtgcccagttgaagagaggatcagagtcaggacaagaaagagacattcatttctagattctggtatttaattcccaggcaggccacctgacccttcgccctgagaaggcacccaagtgccatcaagcgcctggtgccctgccgcctcaaggtctgggcacgattaaacaaaaacgagggattgttgcctaacaaattagcaacaggtaaaagcaatcaagccatctgttgcctcccgccgctgctgcctaatcccctttctcggcggtgacccccgctctgcgctcaaacacaaattaataaactggcctttgcatatgtatttgtggcttcaggtgtggagagagccacatgagcaggtggtgggaatgcagttgctgaagatgctctgctcatgcaaatgtccttaggtagggagggaagtctgctgaagggcaatgggacagggtcagctgacagagaggatgagccctgagtggccagtgaaggtggggcttacgggttagctctctgttccacgtgggaagtgtctctatgccttgctcatccctctgaggtcttgcatcgctggtcccattctccatattaaaaacactgaggccaagagaggctatatgatcatcccagggacagcggaaggcatggacaaaggcagaagtgagccccaggccccccatgatggccagctttcctaggagctggtcttaggccacctcccagagtctcagtttcctcactgcaagtttctaagatatgtaagtgcatcagcaatgcttaattggacttgaccagaattaatattaatcgtgactagtatttatttcaccttctcaccatccttagaaagtagatgttactatgcccactttacaaatgcagaaactgagattccagagctgttaattgcaattatttgttaattggtacttactgtggtctaggctgggctcaggctaacagtaggcacttggatgcaaagatgtacagggaaggccttattcctgtcctcacagcactgacaaagtcagttacaagtgctttggattaaattaaataatggggggggggtgggcacagataggtgggtcagggctatgcagcctctctgaggcccaaaggatgaaaaggaaccaagcagacaagaagagggcaagggcattccaggaagaggaaacagcatgtcagaggccctgagaagggaaaggatatggtgtctggggtcagtgtgctggtgcccagagcaagaaaaaggttgagctcgtggttagacccagatcagacagggcctggccagccctagtggaagctctggattttctcctgtgtgtagcaggaggagggccacctgatcagttagacaccaaagacaggctcccttcactgcgccacgctgtcccctcacagggctgctcctgcaggagtaaaggaaactagtggtcacctccttggaaagccttctcatagccccagattggaccagagtgaggaccctggaagttcctagactagggttttcttctcctggtcacacaggagccacacagagctaggacattgtctttcccattttaaaatcccatgttactccggataaggacagcaaaggaggaaaggaaccttttctgggccaccagaaggatgagcttgggcttgggagacacatctctaagcatccagaaatgtgtctgggagtggggacggcagagctcccatgctgtgatctcacagggggacagggctgggaagtcccttttaacttctgacatcccagtccaggtagtggcaaagatctgggctctggagtaccccccattccttgctgtgtgacctggggcctttccaaactctgtgtgcctttgtttccccacttgtaaaatggacagtctccctcaaagagcgttggggaatagaaaacagctgcaggcaccgagccggatgtctgcactgagtaggtgctgagcgacattagcattaacctccatctgcttccaggctgcccctcttttagccagtcagcatcaaacctacaactcctattgtcccagagccttgctgcatctgaagtttcaaatcccttgttaaaaataagcttcaaaacaagccagaagaggaggtgggaaaggaaaataagagaaggagagaggtggaaggagctttgctcacctgaagccagacctctaattctgctggtggccagggacagccctgccgccagtttctctcacaaatcaaagggctgtggagtaatcaactgcaaagtgctgagttctttgagggtagaagccagaaaggatgtgcttgtccttctcagctcacaggagtgccttgaggagatgggctgggcgggcctgtaactggagttggaggggagaggagggtggtcaagctggagaaagggaggagagttgagaccaacactggctgtgcagtcagacctgatcctcctcctgtgattctggccagttacccacttccttaaggctgtgttgtcttatctgtgaaatggatcgatagcagctgcctggcaggcttgttgggaggagggtattgaataccagattcagagccctgtaccctgggtgtggcacacagtaggtgcagcacacaagaggtgctccgtgagtgttgcttctcattcattcacccctctctgcagggaaaggggaggactggagtgggctcaagtgtccaaatgccaggcttgccatctccccaccccattgagctgtcttccctcatgtgttccttagaagcatcttcctagtcttagggtgtgaagttgcatgtctaggctcctacgccattattcccctcctttctctctcttttttttttttttttgagacagagtctcgctctgtcacccaagctggagtgcagtggcgcgatctcagctcactgcaagctctgcctcccaggttcacgccattctcctgcctcagcatcctgagtagctgggactacaggcacctgccaccacgcctggctaattttttgtatttgtagtagagacagggtttcaccatgttagccaggatggtctcgatctcctgagcttgtgatccgcccacctcggcctcccaaagtgctgggattacaggcgtgagccaccgcaccatgctccctttctctttttattctgtccccacggccctccccactgcctttctcctgagctgacccagccccctcctaataggcttcactgcccccagcctctgagctgcccccaggcccactgagcacacgactgcagatccaccaccctgaggcccaggtctgctttcccctggcctcggcaccaggctcaggcacactccccatcacaatggctccacttggcagccaaagccagccactctctgggtgctgctggccttatggaatgaccatcacagcacctggcaccagctggcacccaaccaaccgtcaacagccctcaccgcacaaccccctctacccgctctcagcactgccattcccaacgctcaccatacccgatcctgcctctttatttttgctcatgcaaaaacccaacatccttcagcaatcagctaaaatgctctctccctccagaatccccccagaatattctctccctcacactgtgcagaatttgggctccttattctagcactcatcaaagtctacttagaatagggccatttgcatagatgggtaatttgctaagtctgcatttaagtttgtactacatggaacaggatgttagctctgaggtgccaatgagatagatacctggaaacaaagtgagtgtgagttggggctactccagggcagtcaggggatggggtaacatgaattgtcaagggtgtggtgatgctgtgggacagaaggaagtgtgtgggtatgtgcacaccagtctgcatatgtgcactggggacttcacacacacagagctccttgcagtcctaagtgagcattcaggcctcattctctctctctctctcttctctctctctctcacacacacacaaacacacacacacacacactgcacatataatgcaaagacatcttgtagatcttcacattcttaaacctcatgattggtacaaattaaacaaatattgaaagaaactccagcagagctctccaagcctcagtcctgctgggtataccaaaacacctccagcagctgaacagcacaatgataaggaatgacaatatgttttaccctttctggagtgctgttcacaagcagctcttagatccttgcgatctgctcccatctttagggaggaggcctgagggcacagtctgtttgaggcagagctggtgttcaaagtccctcttgggattctgactcccaagctctacgggcagaagctgtggaaggctttatatcatcaggtactgcatctccttgggactctctccacaagcagagttcctccaagcctcacggatctacgcctccttcttctatgagacaagaaactggaattttccatgtgagctaagtaatgagggcatgagcatgcacatcctcccttgaggttcagcttagacacaacttcccccaggaaatctctcctacaactctcccctcatccccaggctccagtatgttcccatagcaccaaatcttggcaggtagtatagtggcctgtttgcaggtccgtcatctggatcctgcagcagcctttgagccctaaccacagggacagggtctcattcacctatgggtccaggtcctggcatatcttagactttaacaaagccttactgaacatatggttggatggatgactggatggacagatggatggagggatggatggatggatggatggatggatggatggacagatggacagatggatggatggatgacccaggatgcaaatgaactctatgcacagctacagctatagaagcaaggctcaatcacttgcgggtgtatggggagaggaggaggagggagagggaacgagagccggcctttgtcctcatctcttccacccggcaattttcccaaggaagcatgagttagtcttctaaggaaagtagaggggatgtgaatagagaaggaaaccccactaccttcagtggggtccaagaaggcagctcagccctcaatcctagatgcctcctgagcccagagatcagtctttagataagaaagtgagtgttctctgtcactgcccctgccagggggagagaggcccctcctatacctgctcctagtacactctgcacccattaccagtttccctggctgaaaatctcaagagatttttcctcaagtacttgtatctacaggagtttaagaaatgatcatgcagagaattgtcatccccgactcctctgcaaaccctacagaggcttggaaaagttcatcttccccagactcccaacattctcttttctgtggccagtagccaaccatgagcgagttcattaatattaatgttaataatctcctacatttgcttcacgctttcctgcttacaaagcactttcagatccatcatctcagacaatcctcaacaccagcctgagaggtcagcggggcagtgattaccatccccatttcactgaggagggaacaaaggtccgggaagagaagggatcagcccaaggtcacagagcagccaggactggagagagctcagggcagagtccaggtgtcctgacccccaggccagcgctgggttactccacctccatgctgacaacccctttccttctctgcctcatcaatgtcaccattggcgtcatctcctggttctcagtcattaaaaagataggcttaaaataaatacaagaggcaggctttagccatctgctaaaatgggtaaaacgacctgccagcaatttgctggatgaccttgggctagacagtttcctatctgggcctgcaattccttgtgtttcaagtgacagtgctggcctcttctcctccggccctacccactgtgacgggaggctgctggaacctaagggtgccacccttggtgccagactggggctggcagcaatcatgcctctgcgatcccctcctcagcactctggagtgggagggatagacacctgtcatgagcctgtgacagccaaaggatggagctataaagcaacagaggactggcaagaaccctcctgagcgtgggggtggagctaatcacaattgctacagtgtagctactctatgacaagtgctttatgcatgttattgacatgcctcaaaatagttctaccagacagcaattagcaattattttcattttaaagatgagacactccaagctcagagaggtttcttgacacgcccaaactcacacagcaaacagcagaggcaagttccaaacccagatctgctctgatttctcagtcccaaatgctagaaggtggagtgggaggggtgcacgtggaaccccctaagttcacccttcctccattttctttctcccaacctctctcccctcccttctcctctcttcctccctccctttccctggagtcacagtcccaggctgggtctcctctgctgcaccagctcgccctgtcatctcagcacaggcggagatttatggatctcacttcaaggatttttctttaataataacatttataatcattttagaaattaagaactgaggatgcaaagcattttaattaaaataatccgcagttgataattataggactctcttagctggaaccatcttctttcaatctgtcacactccctaaggaaggcaggagataatcgtgaggcagtgagctggtgagccagccctggtacctgtgtgtgataccgtgtgtcccaggggtcattctcagaggctgcctgctagggaggtcggcttcggggtgagctgggctggcatcatctttagagttggtcccctgtgagccatgcaaggctggcttttcacaggaggataagcccttccagagcctcctccccacccctacgacacagtcttctgctggttacccctgtgggctcagagggtctgagacccaagacacagaggaacgtagaaccctcgctcggccaatgccctcctgctaatgcccccaaattccctgcctctctgccccagccccaacctcaccctcaccccaggtgcagttctgccctctgtggtcaggagagggcagccaaggccaccaaatgcagacagagtccctgaagaatgggcctgcttattggacttagagaaggacaagagaggagccccggcttggggaggtgggatatgaacaagccaaagtgaccccactcgatgcctaccactgagacacctctgctcagctctggccccaccaacagagaatgacacagatatctcttcccttcgaaggtcacattccagcagagacaataaacatgtaaattaatggtaacagaaagtgattcatgcccaaaatgaagctgcagcagtgagggtcccaagagtcttcaggtctgtgtgtggggtcatcagggaaggcttcactgaggaggcaatgccttggcagggttgtgaaggatgaataggagcccaccccggctcagtgacaatcttgaccactaggatttcttgactgtttagcatgtgccacacactgtgttggtctgttgtcacatctcattcaagcttcacaacatgcctgaaagatagactttattatcagcacctttgtttttctctagataaagagacagacttggagaggttggatcatgcactccaggtcacatagtaaataagaggcagaggtaggcattgaaccccaacccatcagtgccaacccctgtgcttatcctgtgcgacgtggggccctccaggataacagatttgtctaggaagacttatcccccacagaggaaatgtgtacaaggctgcagggcccaaagcgagtgacagcagctggtaagagaggaggcaggggtgacagctaggtgtgtcctgccagaagaccagtttggggaaagcttaactgagtgactgtccctttctgggtcttagtttccccatcaataagtgtagggtggggctgtctccagggactctgattgtaattgataacaaataatggcatttggattggttgggactgctttagagagctcagagggtcttcagatttctgggcccactgtagcatcccaagctctgggcagagtgcctctcccctgccccaacactcatcctgggagagagggggtgcacagggaaggtgctcctcaccagggctccaccccaaatccattaagggcaaaaatgtaatcgggaaggagattctgacagtggcttgaaagtgacctcactcgggctgatgaatgcctccgtttcctcgtggaaaacatgcgggacatgagccggccagccaggagaggattggacacctccagcaggaagtggcagctgtcccgccactgaggccagacctgtccctccaccctctgcagtccaagcagcttccgtccccacccccactggagcctccccaagcagtggacaagaccggaaaatgattatataggctcactcatggataaaattggttcttggtctgagaagccacaaaggggagatccaagatgagcaccatggaggtcctggggctggcacgctggcagcgaggcagcaggagtggaagtctgtgccacgctggcccaggacacaccatcagggccacccttctatcccagtaatcacagcttaggcagcagccccaatcccctgataagcaccttctctgcaccctcaagagggcagaaattggctgggaatactgagaagaaatttgggcctcccagacccagggtttctggggaacagctctgccagggttgagcaatctagggaggatatgctagttttgcgaggctccaggctgcagataaggctagattaagtgagggtttgaaggaggggcgtactcaatgagcccaccttctaaacactgcccagcaaagcacaaccttcccactacttcctaaatagtggcttctctggatgctagctggcctcttcagatgaggaatttccctcccattctgggccctccccttcagagaacactggagcccaaggtgctttcagtaacaagtttcattgcagctaaaaataatggagcgacccatatctcatttcctgcattctgtaacgacaagtgccccaaaaggggcagtggctggggattagcaaaaattcaaggcaactggaaaatatttagatacaataaaatatgtgcattcaaaagaaagctaagaaaaggcaggattcagaatgatggttaccttgggtggggaaaggcagggagatgggacaggcaggaggaagccacacaattaagtgtcaatcattgtcaaggactctccttttatgttaggaggtgagttgggggcacttattgcattgttatcatgtgcaaatggatgaatgaaagaaaaataggaccaaacatggcccaatgaggagagtgtaacaaagatgataattactcaaatttggtgcatctgagcttccaaaaattggggaaaatatcaaagaaaagtgtaaattctatgtggaccacacatccctccccttcccctgtttggctcccattactgagcctttctggctttccaagaagagtcttagggcccagattatgcagaaaatttcctcttaaagcagaactcaacctgctactttggtgtcctggacattaaaaaggaaaggaataattttaaattaaaaaaaattatcctaagatgtgcaggccaaacggtgtctgctccccctgggacccaaggggtttcaccccaggggaggctggtgtgccaaggacattggctgtgatttgggaagggtgagaatcaagagagccagagggtcagcttctctcccttccccactttgagtattcctgccctgagaatcttgtcctgacttgggcctcaggtggcagggtttcctgaacatggctaccccactctaggcccaggacaaggggacctgtcctactctgccaacctctgtctctctctcccactcccattcccctccctggcctttccctaaggaagagatcctatgggacttcccacattctcctgtcttagggtgctcagcttttcctgagcagatgggatggatgctcttgaggggctcctctacttcacaaaggagcaagaggtcaggatccctaccattccagccagacagaagccccggccccttgcctccaaattcccaggaaaacaggatacagaagagacccttatctccctgtccttgttcaagctgatccatcattatgtctcatttcatagctcttgaatccaaataaactaccatggagcatgttagtgaggcttcccatgctgtggttggtctgctctggttagtatcccatggggaaggccaaaaagagcagctgtttttatagaaatggagagattaggggaagcaagctcaggctaaagcccaggaagagatgaggtgaatgtctggaccaagcctctcctccaagctttatgatccttatgcacagccctttgaggtctgcacagtcctttattgtatgtcatctcacctgatagtactttgagagttgtcagccccattttctggatggggccagtggctcaggagtttgcacttcctgctttgctggtgtggccctaggaagacaggtgacaggtgcaagttcacaggactcataagtgacagacactggcctcgagcccatttctgctggtttctggcctggcactctcgagccactgcttccatgccagcctttccaactgcttccctcagctggtggcctagggaggccacccccttccactgtggcaaggttgccccagggaaagggaatagacagggaaaggggtgagggccaatgactgcagaacgattggcctcagaggagactttgattcagtctaaggaagcgcttggtaacaagacttaaggaaagaaattgtggagagatgacagggaggaatcttggctctgttcattcttgctgtgatactcaggcatggccacttaccttctctgggtttcagggtcccccttgacaaaaggacattttattactcatcttcctgcctcacagaccagctgggagttaaatgtgatatgatgtgttatggaagagcttcctcaatgacctaagctattcactgagagccaacccggctctttgtactgtccaacagaggaacattctagctggtgagagtgctcagcctaggccttatgttccctccaggacagtacaattccacaaatattcactgggcacatactatgtgccagggcactgtgctaggtgccagggacagagaggctaagtgatcaacctggtccctgactccttagtgctcagactctggtctagtgattctcagctacgattgcaccttaggatccctggagggaagtggcaaaagcatcagtacccaagccccattccaggccaacgaatctgaatctatatatttttcaaagctccaaggtgattctgaatgcaggatgagacaagaaagtaagcaattacagtattttcttatccttggtctgctcaggaaagtacagggagaccttggaaaggtgcctaagtcagattttagtggtggtggtggaaggagggttagggaaggctactggaagaaatgacaagtgactccatgcaatgtgatggcaaagttggaggccctgaaggcagttctgctggactgactcagaaggtaaggggaaggcaacatgtttgaggctggaagaggcagtcaggggccagattgcagagggcaggtttgcccaattagggagtttgcacagaccccagaggcaatggggtacatggagaggagttaagcaaagaaatgccatgatcagatgtctgctggttgcttaggggacttacgttgttcatctgggtagcaaaaggctccagcaagttggggtcaggacctcttccactacccccatgcatctggagagggcagaagctttccccagggctgctgggcgctactagtttaatctgagtttcatggtgcattagcaatgagctctcaggatcagccaagtccctggtactaatcagccgctgaggcaggatcgatggcaactacattgatcttgctttttagctttggctccttatagagcttattgactggacaatctaagagggcgggggatgtgcacccaagtctcaccgaactgtggtagaaaagcgaggagaagggtccctcacaggtcctgcacctcactctagtctcacactcatcctgaatgtggcccccactgccaaatcctacaccctacacaaaatcatggtgttcaaggcttcagcctcagctgttgccactcactctccgtgttcaggtttgaacccacagaaatgcctttccagctcctctgcctctagatacgttcttctctctaacaaggatgtgactgactcctacctcaatttacccagtctgatctcttccttcctccagatccagctcaaatatcgcctcctctaggaagccttctgtggcctaacctcacccccaaagcaccaataaagtcttctgtatgtccacagcatttgatatgtaactgtatgtatgacactgatacacttttacaactaattactgtgtctgtctccccagaatgtaagttatttaaggacctagcatacagcagatgctcaatgaagggttctggagtgaatgagtgaacaaatgaatgaagaaatgctttaaaatatcatacagatttcagatttatttctttaatcctgaccccgcacagccctctaagggtacagaatagcagagactctgcctaatctaatatggatggcactggttcagatttatacctgaaatattagaactgggaggaaacttatgccttattgttattgagttcaatccctaattttatagttggggccacaggtccagggacaataactgactcactcaaatctcacaaaagcagatggcaggctgagaaccctccaggtgctactttatgtggacatgaccatgaaagtgggggatagcaaagcccactgaacacctccaggtattcccacccatcactctgacttcctgtaacagtctttgtctcttgaggtgcatctggctgaacaggtacctattagctgggccacaggatggaggctcccagaagacaaaagttctttcttacagtgactcactatatgaaaaaagggctttatttcatatctacaagcctcagtttcccaatcattaaaatgggggaaaagattatctgccttttctcttctggtcttaggagaggctactccttgagcaaagcctgccattctttaaaaaatatcttcacaggtcatgccatctggtatcgatgagagaaggcaagagaacatggggtctaggaagtcaagctgagaacatagcctgtttttgtttgttggtttactttttattgaaatacaacatacagaaaaatgaacttatcataagtgcacagcccatacatttttcaaaaactgaaccaatgtgtacataatatgtagatcaagaaatagagccttcccgaagctgcccttggactcccttcccatcactactgcctaaatccaccatactgatctcaagcaccatagattagctctgtctctttttgcacttcatagaaacaaaatcttataactgctcctcctttgtgtatacctccttttgtacaacatcatgcttccataaggttgtgtgtcattgtagagtggccattctaattgctagatattattctattgtataattatattatgatttgcttatccattctactattgatggacatttgggtagtttccagtttggtgctattacagatagtgttaaaatagtctgtttttaatattttaaacaatcacttaaaaagacagatactttaaaatatccaggaagaaaataattgtatattcatgcttccatttaataaatatttgtcaagcaccaactgtgtcctggaatggtcttctcccttcctctcctaagcttagcctttacagaacaggtgacatcccacctcttctacaaagcatttttgcttgcccccaacctatagtgacattctcccaacccttaagcctcaaggtaggtcttgccaagaacacacagtagaccatgagcccaccctgctagccttgttcctgctccttctctgcttattttcaggtgggcacttctgaaaagcaggtatcatctttctctgccttccacaataccatgcacaacactgggcacattatcaaactcacagaatatacattcaatttaactagatctcagccataagaaggtgatgtaaatgcatgaagacccccactctctgtctctaccccaaggataatatttttgcaaaacatggaaaagatctatgccaaacatgggcaaaacccacggacagcgatggatggagaaatgcattgcagtagccttgatagccaaaatgaattggttccagagcctgagctctatgttgtggtttataatcacttctctctccactccttggtgcaaataatcagtagacactgaagttttggatagaggacaaatttcagcaccatgggtagatcatcctgttggctgttctcaaggagccacagcagacttaacagcaaggtattttagtgagacaaactcatcttagttgaatttcagaaatgctcatatcctattttcactttcccacagacttctgctaagctctaaattccatataatgaggttgaaaaagtataggttttaaagctagatagacttgaaattcaaattcctgctgtattgcttgtcagctcgactttaggaaaattactcaatctttatgaacctgaatttattttatttgtaaatcatgcttataatatttctttatttcagatgttatatttccaagtctaaaatttgcatttggttctcttctgtggtttcttttcatttcttcttcttcttcttttttttttttttttttttttttttgctaacattggtagttcagtctttacattcattgtagacatacttttctttatatccttgagcatagttataagagcagctttaaaatatttgtctgctaattccaaaatctgggtcattttagggccagtctcaaatgttttctatgggtaaagttttcctatttcttcctatggctagtaattttgaattacatactggataaagtaaatagtataaagtgtttagattctgtatattgctataaaaagtattgtttgttgtttgcttgtttaattaagcagttagtttgactaaattctcactgcaaaactgtcacccctttggtggatggcacctgaaatttcagttccattagccttaattgggcaccttggtgtctgtcctgcatatgcattggttcaggggtaagccagatatttgatagaggttgtacacagagtctgaggttccccaccctggtttgcctctttcaaggtttcctcctttacttttcagctaccatagttgccttgaaatctattccctggctcttcaaatcagtatgacgaggtttcgacccatctaagacacctagcatgaggagtactggggtttgccctccggctaaacttattaagaaagcgaaatttactcagtgcccttcccttctcccaagtgccaataaacacccacgcgaacccttctggaatctgcccactttaagttactctccttctgagaacgattttttaaatattttgttcagagttcacagctattatctgtggcaggtgtggtctgttaagagtttctcagctggaatcagaagcaaaaactcccatagtacctctctgaagagctgtgtggaaggtggtatgagacaagtctataaagtactcatcgtagatgctcaataaatgttgcctttccatactgccatccccaggcctcctttttttaagcctgaaataatccttccataaatagtgttttgttcttcttgaagccctttcagctacattgcatcatccaaccctcacaaaattcctgaggaatctgcagggtaaacatcagtccccctcttgacaagtgagaaaaccaaggttccaaggaattatgagacttgaccaaagccacatagttaaccagtagcaatggcagccccctgcttgctgacatctccctccacaaacatctgttggccatgaggatgagcaaatagaacgctctagcaaatccaggcaggttgggggagggcttcaccctcacacttccagactctttgctatagaggaatcctgagggtacatatggaatatgccttcctgtgtctagcttcaccccagcagtgaaagtcctgcagactatagggtccagcactgatgggtctgaacacaccaatgagtttatgttaagtgcctcgagggtccctgcatttatcacaaaactgggcagggagcagtgtgttctcacaacactggcactgccacccaggtccagtaagctgtgtgccttgcagtagtaaacacaatttcccaacctgttaaatggcaaaaatatctacatggccagctttacatgtttctagcaggcacggagataatgtgaagatcataggagtactttgtaaataaaacagcaagtgcctgcaaaacagtgctgctctgatctccagtccctcagagagacacaggacccctgtcttgctgcactacaatgatctgtgtccctgggtatgagtgagcccacacaagacgaggcttagcagaggaaggctaggtggctgacgatactggctttaaatctctactgctttacttcttaactgtgcaccttggggcaagttacttcacttctctgaaccttggtttctttatcttaaaaatgagaataataacaataatgatagaaatagtaaataaatcatgaggttattatgaggagtaaatgtgattatgtatattaagtgctttgcacagtgtctagcatgcagcaagtattcaataaataatagctagtaataaaaatggcaagtgttacctgtgagtgcacagaggttctgagcaggctgcccattgccatggaggcacatgcagctgcctggacccttgtgcctggtgctgcccatgacctgctgtgcaagctctgactctggggaacttgccctctgcctctgaaccttcattcctggtctcaaaaacgagggggctggattagagcctgtcttccaggttccacattctgctgagctgcttctagacccccctagacaaagcaagagatttggggaagaaggagcaattggtatactcagctccaggcagttgcctgcagggacgggaaggcttccagactgtgctgagcccaggaaatgtggcctggcgggtgtgggctgcagaaaagcccagtgagggggatagatttcccacacagaagggagagagggcaccacccaaggaacatgaagcaaactccagccaggctgaaggacctgagaccccccagagtggaagctgggatttcagccacaaattaaacctgcccggcctccacccaaagtccctccaccacctcctctgatgggagtaggtttcaattccatcttgaagtgagctcattcctgggcctggcccagcaagtcctgcctagcacaccccattcccatcccctccctctctctctgcacttctcagttagatagaggtggtgagaggaagttgagaccctggctttgccactctctattcttgaggaaagcacctctaaacctcagcttccaaatacatgaacgaggtctaatgatcctaccctcataaggtttcactgaacaatgtatggaggagtgcatgagctggacgatggtccttgggccctggcgctgatgccccctccctgccactcagggtgcaggggttgttgcaggctgtctgagaatgtcctctcactgcagtctttttgcattccttcatttgctcaaaaaacagtgaatgggcatctactttgcccatggctagatcagagcttttcaaagtttaatatgattcaaccggagaaagcttattgaaattaaaaaaaaaaagtctaacatgcacacaaattacctgggatcttgtttaaatgcagacgttgattcaggaggtctggagtggcacctgagactctgcatttctaataacatttcaagtgatgcggaagctgccaggcatggaccacactttgagtagcaagagactggaccctagtactaccattctgagcaaggtgtacccctgcctgcttggagttcagagtctaatgggagataagaaaagaatcatacactcagggagtgatagtgtcgctcatagtggcagggaggcacagggtgttatggaagtgagaggagagacacctagtctgaacttcagaaatcttggagggcttcccgggaaaagaaagcatgtggaggaaacagtcaggtcaagacaagatggacgaggtgggacagaagatggcattgcagagagaacaacctatggggaggccttcactccagtggatgggctgactgagttcatcataccagactgaagagctacagagtgaggagttggggaggaggctgcagaggcgggcaggggccatgtcaggaaggaccttgaagccacacatctgagctggattcagtgggtgacagggagactttgaaggattttaagcaaagaagggacatggtcagattgaaggtttagaaagctgcctctgcctgctgtgaagagaagggccctccaggctcaccccaggctgaaccactgcaagcagagaaggccacgtcctgctgcacgttcccctccttcccagcgtccttactcccccctgcccccaccaccacccagaacactccttccagcccaggatgtcattaagctggtaaccaaatacaacacaagagcctcaaatgccacttcccacccccattaaacattcaaggtgtcagaagcccagccgggtcttaggaaggaacagaaaaagaagcaccagtcctttcaataacacgctcctgtcctggacatcccaaattcagaagcataaaagtcaaaaagaagaccctgggcctcaaagagcccttccatccactgcatggaggtacctgagatttgctgctgggattgaagaagaggcagaatttagggcaaggaggtgatggttctaccatccttgtgaaacatccagaacttggacaaccaaggacacctgagacccttctggaaggcctaagctgctgcagaggacacttatcttgggtacctggaacatctcagctgggagaggagaagcagctgcctcttggggttagagtttacctctgaagcgtcccacttcctgcagttgctcttaatatagagattatcagacaagggagggctgggtttgagtcttgcatctgcttgagatttgtcatgtcacctgtatgagctagcagtttgagctagatgatcttaatatagacacacccatctctcggagtctgaaacttctcagctccttagaccctacatgccttgtcccatggtctaaacacatctcttgcccttttgcactaactgtcctggttgtgacctctggcctgagtctgtgagtctcaggccctgcttataggtctatggtctcttacttggcactagaagtggtccaggcagtgagagatagtggcaagaacactgggtttgaagtcaggtggctgctagattcctagttcagccatttacctctgtcaccatgttgaataagttctcaaattctttgatcctcagtttccatatctgtgaaatggagatgagacttctatattctccagtggttatgggcattcattgagaacatgagaaactttagacagaactgcaagatgatcatataatttcccaggagcctctggtcaggaagctcctgacctctccctggaagcatgacaggtgggcaagatagtgcatttggcttaaggcagcctcatcccaacccctaaattccccgtttgtttcctgtacaccttatcaaatgaaagaaagaatattagctttggagtccaagacccctctgtttaaagcccagcttttgttctaaccaggtgaccttagacaagtcaccttttcttcccaagtctgggcttctcatttgcaaacttgaaatacccacttatggaacaattgtgagaattaaatgagacaatgtctgcaaaacacctagcacacagtagacatgcagcaaccctccactcttttccaaggacaacatagtttaaaatatataaaccttcatttcctttggaaagaacacccctggcaggaattaaacccaatgaaaatcaaacactgattctcccactccaatctctctcaccccttgttaaggaacgttctgcctcatgtctgcctgtgttcctcttcctgcccgagctcacagattctgtcatcaatcagcatgtggtcggtggcccccatggtgtgagcaaggcaggggatgtggacagactgtgggatcaaggagctaaaaatctgtatgggctgtgattcaaacacatggaaactaaattaatgcaatgagcatcgccccaggtccctggcacttccattgcaaacaggcatgtcacagaggtgggggatgctcgagtaccagagcagagaagttccctggaggccagagaacatcaccaaatgtgcagaatgggtaccttggaataccagcccaggggctcaaaggtgcctcacagggtgagcataaatgaggcttggttggggggagtctccatggaaggcagaaggacaggacttcaagctgagctgctcttgtgtgcaaaggccaccagccagccctcttcatctgcaccctcaggtctgaaggacaagttagtatcaagctgtggagagaagttttcgcagaagcaggtagatctgggttcaagtcccacctccaggcacatcacctgtgaggccctgggcaaacttagtcacctctctgagctcccctttccccctgggcctaagggtgggaaaacgccttgtctgcccaccccttggactgctgggagtatcacagcagggaagattgggaactcacattatagctgagcctttgtgtctggagtggagatgctggtggtgattgttcggaagaggctgtgtggaatccctcctaccccagggtaggtggggacctggtgttggggagaaggtggcagtggaggtggcaacagagtccaatgtctttctcagcctgagacaagtacaactacatatcagggttagagccatggttcccagcagacaaatgccacgggcccaaccccttgctctgggagctccagtcctcatggaggaaagatgagatgatgttcagaaatctcctgcctttaatgaataagctctgtatccacccagctgccagtccccaaatacctcttcccttccaccttgaagccagagtcctttctatccttcccagactctgagctccatttctggcccctggggtgtccaggacttggtggcctggcccaacccctcagaagccccagcagtggtcctggagcagccaggccctgcagcttccacctcctctcatcctcccctcacccgccttccctgagacctgtcaggggacgctcagtgtttcctcctctcctccgcttgataattaagcgtccttgtcctcagtccccttcctaatctattcattgtgaatcgttagtggataattggacggaactgaagaacctggacagctccaagctggacttggaggcccctccccacgggccgaacagcctccttccctgtggctccaagcagaggtgtcagcccaggtcattttctctctgccatgtttcctctttctctctgtcactgtttacggctgtgtctccccctcctttcttcccggttcacagcaagactgtgagcagggacctgatgtgatccagcactgtgccccaattcctggccctttccttggctgatactaggtgctcaataaatatttgctctctgaatgaatgaataatggcatttcccaagtaagtacatcctatttcatgggacggttttcaattaaagagttttctggcatctttgaacaggagtggtagtaaaatattcaacaaccagccctggagcaggagcccggaggttccactgaaggagggtacttggcaggaggtggtgctcacagagctctgggaagtaactacttagcagccgaggtgggagaatttcactattttaaaaggatactggtgcatcctggctgcaagtcagacccaagcgaatgattgaatgcaggcatcactctatctcctggtcaccctgggttttacctcggtctgccttgcccactccttactctgcctctctgcccttttgtaatggggttgggaggttatttccctgagaaaaacactgaggagcagcccccggagttgataggaaaagagtggtcctactcaggcaagctgcagctagggctcagacagccacccaagaagaaagggcagagtgccctagtgcagccccacccaccaggctgccccagatggagcccaggcagcctcaaccaccgaacatcctgtgcccgtcaacagaacacagagagacggactggctggaggcagcctgcacaacttcctagccctaaccatgagagccagagctctggaagcctgatcccatgttgaccttgacctgctctgtggtcttgaataagctggcattagtttggctaaatggaaaaatgagttctctgctctatctctgaacaatttctgtcaagatcaataagccagaagccaaaaagtccaatcttaggcttggttgcccaggacaagcagggaggtaaccccatcaggaggaacacctagttcctcctgccccacccccaactaccacccttggaccagtctgctacagcaaatctctcatttttcaatattgcttctttgataagaacaggtcatatatgggggaaaaaaaggtgtttacaggcattatgttgttgacattagcttcaacatcatcattccaactttgcagggggagaaacaaaggctcaggagggctatgagggtgccccaagatttcacactaatcatggacccaggtctgcctggctccttccaaaatacagaaaccaatgcaaaggagaaaagagtttgctatctattcaaatttccccatcttttctctctccacccccatacacaaagggctttaatgggtgcctttgccaggctccaggcacaattaggggcattgcctttctggcagcagaagtgaggctgaagcagcccccttaggctgggggatccagctgggatcaatccagctgagttaagagatgaatgaattggtggagtttggggccagtggcctgaagccctgggaagctagtagtggcaacagcaaggcagggtcaggtcctcagaactaggaatgaatccacacactgatcccttttgtgatctctcttaagttccataggccaggatttgggggcatgtggtaccaagtgataggtacttggagagatctcagttgacagcaaggagctggacccagccataggtagcattttcatccctgaaagacaaacagagcccatccaggagtgcaggtgcgggagagccaaacctcttgctgacactctgggccactgggcaagagccagggtgcaagaggtctgaatggagcagggatcagtgtgttcactcattccagttctgaggacttggccctgccattgctcctgccactgctagcttctcagggcctcagtccattggccgcaaagctccactaattggttcatcttctaactcagccagatttgccccagctggatatcccaggccaacaactcctttctcgaccttccatttcctttgggtgcccctggcttgagttatgattgctctggagtctgaggtttagttgaaccccaggaagctgtgtatgtcattgtaagggtacaaagagggctagatcacacattagaaagaacaaacacaccctcaccggggtccagtcataggaattgtgatttgccagggaggttctccagctcagactgtcaccctgctgctgtgtcacactgctgggaatctaccttcatccatgcattcctttgaagcactttgaagatgcccctcttcgtgggggtccatgccttaaaccctaattatgatcagatgagctgaactgcaaacttgtggatgaagcccaaggcatgctgaatgggagaaggatgtcacggcaggaagcggagagaggaatcatcagtaaggaagcaaaagatagaaatgggactgcacgtggcttcactgttcctcatggcaactctgtgaggtaggaattattttacttattttaaagtcaagaaacaagaagttcagaaaggtgaacaggcttcccgagttcacagtcataaagatcgtgttgtctttctcgcatgaactatcacctgagagatttctggttttgattccttgcaaggccatcgatgtacacaaatccccatgtatgggtttatttttcttctgatcttttatagtcttgcccacccctaactcaacagcaattttttagcaaccttcccaatgcattacattaattaccatagaaacataacttttctgcactgttatttaattggcttatgttacagttggttaaattacctgtttacagtgacaagtgcaactgacataaacaggcttgggggcacacacactgggaacgcacatgacgtgggcaaactgggaaagggttgtctaataggcagacattccaagagccccaggctatagctgtgtttgagtattttacaaagggagtagaggaatcaggtcatctagttcatcggttaaataaggttagttcagaaagtctctctgaggcaggatttgaatcctggtctgactccaaaattcaggttctttccactatgcacacacccatattgcaagcttaaacctttgccgagggccagccctatgtgggtctgaactcttaggggctgctttttcaggcatgtgtaggtggtttaccccagcctttggcttcccttggcttcaccccataagctctccaatggtctctccaagaaaagggtgattccaaatggggccccctccattgagccactccatgactcactgtcctcatctgctagtgggagagttaatacctacccacatgtcacctcaaggatcaaagatagagaacagggctgggcacacagaaagagcttctcctcaccacatcctctcccaattttctttagagaaacacacatctggattctcagaaccagagggaatcttggagaggagaatttattccaatattttccaaactgtgtggcacagtcattccttccttgggataaaaataagtggcttgaggaaaacagggtcatcaagggagtctgggaaacacctggtcaggctaagttgaacaggtgtctgtgctatggagatttcagagcctgtaatgtgtgtgggagcatgaaaagtttgttctcccaaattctttccccaggacatgttacatgaacagccttctaagtaaccctctttgtaaacccctggtctggcctattcctctcatcttactgaagagttgaatgaggccatgaatgtggaaggaatttgctcaagggtacccagcctcagaactggaaataccttctcagtgttctcattccatggtggctcccctcctcccccagcccacctgtgtctcccaactcccagcctcatcagactttgaggatgtgcaaagaggaggaccagaagagcaaacaggatgatgggggcccctgctcaagcagcctccacaacagctgaggagtctccagaaaccaagagattggggcagtgcttgagagacacctgcttatactggttcagcataatcccatgggaaaaaaagcccagacccacaagtagactccccttgggcctctgagcatttgctcatcttgcttagagctgtctgtccctggggctcttctctctgcctggccaaaggttttggaaagagagcttgtgtccctctctgtctcagggagattctgccctagcacccctagtgttggtgttgatatggaggggagttggagttgtgtctgtgtctatcagcattcttgacattctggttgaagagaggagaaaaggaggaagagggctaaggtcctactcatggggttttcctggcaacgttgccccaggccctgtctgtccaactccccacctgtggaggcaagaggtgacccccagctggtgctgggcagaatgtcaagtcagcaaggctagcgtcagctcaccccttcacctgttcatctctgcacatcgaggatgctactgcctcagccctgtcctctccattcctgtctctgagccaaagcatttcagatggtgccctgggcttcctggcccccgacgcctcactccactccccccagggcctctccctctgtgccagcatcaagctgaaatcagtgctcatgagtgggctacagaggttggtgcccaaagcctcatgcattcaccccatgcccaccatccaggactttaggccctatcgccctcagacattgtctacctggtccctggtacaacacatctcgctcctccacgacaagccttccctttacaaaggatctgattgctgtgggtcagtagttgttatggctaaagtaaaaagggtgcatcctctggtgacagtccagccactgctgtcccatagggaacgttgttggtggcctgccatccatgtattcttgggaaggcccttccattcttcctcttcaaggaagctgcccctgctccacctggctcaagcacccttcctgtgctcccaggtccccccgccacctccgtcacagcactagccacattgctggagttgctgagtctcatctgccttcctcacttgagtgggatctcacaggagggggataagtcttctttatcctcccatccccagctcttcgtgtggggagccacagagcaggctcttggtgtcacccgtgctgttgttgtttaaacatcttgatcaaggaaggagtgtgtcatttttcaaataatctcgcagacagctggggagggtaaaaataagtctccccaaagggcacagaggatgagggatgtgcatcaggcagtccctggcaggcctgtggggggcacaacactggctagacgagctggtccgagactttgaaactcaatgttctgattcactttggcaacccctggctgtttgtcgtgccagggaagttattgacattgaaattgaaattgaaattgagttaggagaggggagggaggcctgcaggagccatgcaaatcagggtgagagagatggagacattcctattctgggaagccctttattatcccacgttcccagcttctgtttattcataacctgttgccattaattggcctttcttctttctccagctccaaggctgtgggatagggccttaagatcacttcgtccaacctccctcctaattacagttctgtctttgagcatctactatgtgccaagccctgtgcaaagtgctttacaagggttatctacagaaatcatcaccttaaacatcagtccatctcaacctttccagtcttactctcccagggcaggaaacaccccgccaaagcagccctgacaagtgggtggccagcctataattgaacaagttccgtgacagggagatcactacctcaccagcaccccactttgtttgttggacagccccatggttacaaaggttcttcctgagctgaaatgtgcctcttcatctgttgtcatgggtactgtcccttctcctgctactcctcccagagcctccatgagggacaccactgtcagtggtcatgggtgcagacagacagtgctttgcagtgggatgagcggtgctccaggcatccccctaggattgggaagaacttgagtgaccctgtctcaaagaggacaacccaactgtcagccctatgcatgcgcacatgttccatcccccatatgtgtgctcccatctgtcattctccttcactctcatttgtcacctctctgtcactcgcacatcataaaatggagcccaggtgcaagagagtcagctgcaatcaaagcaataggaaggcagattgctgcagactgacagacggacaggaagtcaggcaggcctctgcagaaacacaggcagcaggcaggtaacaaacctgacagtttttttccctgggacagatggacagacagttggggcagacagacagagccaggcctcgagcaggaagaaagtcaagcagacctgcagatgggcagcagacggtcaggcccctctgtctgggaaatgggccctcgctttgtgtgctgaggtcccgggctgctctcctgggctctgagccccaccttggctgagaagttctaaggagaagtctgagaacagcttctgtcacatcacagaggggtcagattccccactgaggagagcaccctcagtccttcctcctcccacgctctctaccctctttggcagcagcctccatgcccatcgctgtggcctcctcatcacaaagccagggaaggggccagaaagagagtctgtatctccttctggaagcttccacaaactgatcactggaagcatattctttaaaagagaggaattaaaggaaatgagagagattattaagtatggttagcccatttgaggcaacagaatgtcaaagaattaaaatgatttacccaaagcccttcagccagccaggggcagaggtgagatttgaacactggtgcatgtgaccttggaagttacagtcttctctctgctcccaaagccatctccagaggacacccggacttcttctggctccacgtactgggttccctctgttttctcgggaggatgaggtagtcatgacagatggggtgatttatgttctgaaggaagttcccactaaagaaggctatgaattggtccagaaatagcagatgatgtcagccagggcatcccgccctccccaggcccttggcatcatcctcatgagaccgtcacaagaattgatgtaccaacaattacagagattggatttgccctttcctggcttggcctgctcagacgtcatccctggtgttcagggaacacctgtctatttgcccagctccctcatcatcatgtacgccctcgtcccttccctaagcctgggaagagaacatcaagaggcaatattgtattccagcagcatcacccagcacagcacagtttccatcctgagccactcgccctagccctctttgcactccacacttccaaacgtgttgctaatcttcttagtgcctaacgtcctgactcttttttttcacctatagcctcacctctggctcaaacccagtgctaggcactctagcccttttgctttctgcatgaccttggcttggattcttcctctggctgggctgtcgtcgtgtttaggatacaggcagtgatgtgctggagccggcccctaccagctcacaagggccgagtgtgcacatctcttttatctccatgctcagtggtttcatgttagtggattgcagttggttgtggtgggagcatttacaccggagaaactggcaaaccctacaaatcggggctttctgcttgcagggagccagctgttaaaacatttaccagcataaaggactcggtgaaggacttgcccagcgaagtccagccacaggactccacacttcagcacaatggatgacagtcccgatacttcctccaatcccaggctccagacaaaacagcctggccccaaactacacattaaaaaaagctaaagctaaaataggatctaacacaggtcacctagtgggtcaaaggcagggccgggctgtggtttgggaccctcactctgctgacaaaggcctctcaccccctctcctccaggctgtgttccaagaaagtaggggtaatttcaggtcagaaatggcaggatcattctggctttgatcctggtctgagcatttggggggtcccagctgaaatagtgtagggtaagccttgagatggtggggagagggagagaggtcctcttctgtctggcaaccagtaccagggggcctacccacagcaccctcacatctctctgctgaaggaacaactagaaaggactggcattgcccctcccagtcaaggcagttattgtgtaatccaagagcaaaaactaggggggtggaagatggttgtggggacagtatggggctggagaggccctcatgagatgcaggcagcccatcgacagtgtcctgtgtggagaatctagcccattataaggggtggtggcagaagatgcacagatggaattaaggtgatgggagctgtggcaagatttgtctgcctgacttgtcactgcagcctgagagcaggatttgggctccctggagagccggggatggcacacacttactcccacacacatacacactcacatgtgcagaactagtctcacaattcctggggcaggcgtccatgccacttcacagcaagctagacatcacacgccctgaagcacattcacaagcagacacatacaaacatgtttgcacccaaaagtgtacacttggagaaatgcacattcacttggaggtgtgtacacacatacacgcatggagaatattttgctcctaatcagcttctttaagctgtcagacagaggctgccaatatccctgcatttctgcaagaaacccttccctggcctcctggctccagtctcatgcactccattccaacctccacatgggagtcacattcatgctcctgaaacatgatcctgatcttgctcttctctggcatggaactcttgctttcctatatggaaagaggacattcaagggcacctactggctccagcgtcggaacccagcctggcatgcagagccctgtgaaatctggcccctccaccttcctgtatatccccactattccccaccactcacctctcaccatgcctctggtgctcttcctctagctccctatggccaaatccactgcaggattatgaagaccactgcttcagggatacactcagacatgccctagagagaggtgatctctcatggctctgaacaagtccatggcctcgtctgtcctcttttgggtcctgtggctatgtccagcctgtctgagaaagtggtgaccatgcctcaccttacctgctgcactacaggcttcccgtagctcatttcctgtctgtctgagattctggcacatggtacaacctcagaaaaggtttgtaggcagctaggttggaccattgtcctttctcagtcacctcccctgtcgccttctctcttttctcctgtttatggtgggtctggagctcactgctagagaaagttccctggaagtgaagctcccaaacttcccacaccatgccaagagaattcaggaaggtctgtcagtcacccactgcatgcaagcagtcctcaggctaggggagtctctaggggccattgagtccatccgtttcgtatgcaagcatatagtcggtcactaaatctcagagataaatacagattctcctgccctactcccaaacatctgtaggccgctctggaaagctttcttattagaacattctttctcatgcctgacttcagaaggtaaaaaattgtagcatagggagtggctttatggtcaggctctcctcccattccacgcctgctccacgaatatcttcagggaaggttagctcactccctacaatactgagcacctcccagcaaagctctcttagcccccttgtgaggcactggatgacccattcaaccctcttaggccacagcaatctccagcaccctccaggacagaactctaaatattttggcaagagacagtcctgtatgttcacacaaccattccccataggatgtggattccattcactcccccttttctgagcaccttcccattggctgcaccttcctgaaatgcagaatttagaatcagccttgcccctggagacccagctcccttcctatgccttcactaagccctacctgaaggtctcaacccgctctgcctgaccccagatcttacctcacctatccctcttgttccagtctagcgctttgctccatttctaagtagttcccatgagatcccagcagggaggtatttcttcccctcagggaaagagcactgggtttggactaaggcagacccgactccaaccatgagcctagttgctgaccccgtgcgacctgagatgaggtactttacccctctgagttcatcttctcttctgcaactggaacaatagcctcttcattgctgagtgttgtggtattgaataaagcccccagacaatgcctggcccagatatacatttgacatcacccccttgtcccttccaggagtgctggcttccactggggatcccggtgatgccagcttccctccaaccctaatggaatgaatttagcaagcatctgcacaaccctctatcaagggctctgctaaaagcaagattcataatgtctaatatgttcccttcatctgctaagttaataattctgctaaaacatgagctcatttggtccacaatttgcttcccagaggcctaacgcctcctattgctcatgacttcattagctctccgatgcacacattctctacccgcccttgtttttaagaaagcaaagctggatatgagcaactgtaatggtcccaagctcccttcctttccctctcccctttgtgcctctcctttggaaggtgagggtaggcatgttctctcctgccttctggtttttccttgcctctccacactggctgtggagacgggtttgtgccctttgggccacagcctcaacatccgggaggaccaataggttcaaattgtaaggatacagagttcaggtgagtgtgaagacaggctttccccgcaaattgcgctttcctcaaccaagcaacatcaagcatagttgtgagttccttgggactgagataccacattaaaggtgtcaggaatccttcagggcaatgctttatttttaaatttttttatttttaagagatatgactattaggcctcttcacttcccccagctacctctggaccacacttccatcactttctcagctctagcctcactagccttgggcaacagaatttttaacctggtgtctgcgaatccctaggggattgatgaatgggcttcaaggagtcacttatcctcatgaaattgaatacaacatattctgtgtgtgttcatatattcaatctcgaagcctttatcaaagtctcaaaggggtctctggtccaagaaagattaaaagccaatgctataaaacagtggtaggtaaaaggcaagatcagaaatggttttgagggccataggatcccaactactcaactctgttgctgtagtgcaaaagcagctgtaaacaatagacacatggatgtggctgtgttccaataaaactttcttcctataagcaggcatctggtcagatttggcccacaagccataatttgttgacccctgctagaggtaaaaattattgttttgagagggagtttacactaggtaaccctttagattcctcccaactcattcatttattcactcattttattacatatactgaacccttgctgtatgctaagccttataataagcacaacagaaaaataaaaaggaataagaaacaatcactgccctcaagaattccacagcttaactggagagacatgcatggaaacaattgtcagtcggtgtgataagaactgtaatagaagcttgtacaagagagtagtggcttaaaggagaccaaagatgcttgatccacagatacaaggatgaggagaattttccaagtaggtgactgggagagcactccaggtagaggaagcagtaaattcaaaggcactgagacatgaaccacgtttgggtaagtgtaaggtaggcagcctagaactagagtgtggagtgcaggtaggtgtcaaaggggaggggaagctagaggaaaagacagagtgatatcataaaggtcttttaatccaagctcagaaatttagattttattctgatggcaaaaagaagccacaaaaggatccaaccattgacagttacagttctttagtgaagttgtagctcctaagtgagcatatatgtgtaatttgtcctcttctcttcttctgacactggtaaatttggtattcactcaagtattactactataagtcctttgatttccctaattcaagccaaattgcacaaagccaaaatttggtgatggtattagtcttctcatgctgctatgaagaaatacctgagactggataattcataaagaagagagttttaattgactcacggttctgcatggctgcagaggcctcaggaaacttacaatcatggcagaaggcatctcttcacaggtcagcaggagacagaatgggtgccagaaggggaaatgccagatgcttttaaggccatcagatctcgtgagaactcactcactatcacgagaacagcatgggagaaacctcccccataattcaattacctcccaccggatccctcctgtgatatgtggggattatagggattacaattcaagatgagatttgggtgaggacacagccaaaccatatcagtgagggaggaattttcctccacatgattggaaaggaaacctatcttgctgaaatgaaagcctagtcttccttccttccctccctcctccccacccaccctccctttcttccttcctctctctctgtctttctccctctctgtctttcattttggccttttatcagttggattggggagctcagaacaaggctagcacaatgtcaccaggaaaatgtccataaaaatgtaatcagaaggaagcagtcccattaataagagcacatagcttactgggacaacattaagtgcttttaagactttgaagtgagtctttgcttctctctcgggagtatcttcatttacaaaggctcctaatcttggagaggtgtggacagaggtagaggcaggaactagaagccgtgtaattgtactggtctgtgactacttatgggcaatctaaatctttgagacaataggaaaaaatatagcaaccactaagtgtagctacaagccatactgtctcctctttcctcagctggtccatttccaacaggaatctaggatatcagatcctcatgctatttcatactttaatgtatttcttatctaattgttggctccatcagggtaggggctgtatccatcttatatttccagtggtcataataatcttgcacatagttggtactcaattcatgtgcagcttgccttaccccattaacttctagggccagtttatgactttaagatcttaataaagcacaacccataggctcggaaccctagcatgtgggtgggtgaagatctggaatatcagctgcacacccccccttccagctctccatggctaattcttcaattactcattaatgctatttatcaagcatttccatttctgtcttctaggcatatggtaggattgcttttcctcatcttctttttattggaggtatcatgtgactagttctggcaaaatgattgtaagcaacagtaatcatgtgactagttatagccaatagattgtgagcaaaagtaactctgtgactagttctggcccatgaattgtaaataaaagtatccatgtgactagttctggccaatggagtacgaatgaaaatattacttctgggctaatggctagagtgaaaccctcttctctctaacacagtgactggcaatgttcaatgctcaatcaacttacatgcttcagtgactaaaatgagcagtttccctgccaacccacgtagacatgtagcatgaatgagaaataaacctttgctgttttcagctactgagatctgggacttgtttgtcaccatagcacaacacagccttaatctatcttgtcatctccttctaattcctcttttttcttccacttggtccagcattccaagatctcttctttccttagttttttatctcacaaacttgatcttctcttctccattcaattatccatttctttaacaaacattccctgagcatcagctccaaggagacagaatatgaagaactagagagatgaaccagacatgccctcaggaactcacagtctagtggaccctgccctggcctgggcaggtctccccactcctagtaagtcctgtgtctgttaatccaatgctctaatcactggccatctggctcgtccttgaagaggaaggtcaggaagcacttactaccccgaccatggtcctccatcactaccaggacctcccttggaagaacttccttgactgtgtggctggatggcccaggggcctggatccatgcacagagcactctggaatcccactgtgatgccctgtggcagagcatggagctgcctgtaaagtctttgattcttttattggtaaagaaaccaaaatacagagggacagcaatgatgtacccaggtcacccagtctcaggatcacagggtctgggactagaatttaagactcttgtgcccttgaaagaaagaattctggtcttgagcctcagtctactctcataacagtgaaagggtttccaggaagctgtaagaaaccattagacccatgaacttaagaggaaagccacagggatgtacgggtggaggagtaggaattggggaaaagaagatcgtctcactcatgggaggggccagaagaggggctagtgtgatgtcactaatgagagtaaaatgaggaaggagcttggcctacctaagccattctcctgtctccaagcaggtgagtctacacccctctgggctaccacccctcacctcatgctgtctcctgaaaaggactcttcccctggactgaaacaggcttggcacatcacctacaggtatctgggcaaccaggtaagtcatctcccttcaaatacctccaatccctgagatgagtgcatttagattcgaggagggaggacaggagtggggcatgagggccagatttgtgtatttcagctcctcatactcagtgtcttccttgtggtggccgtagtcttggcctaggcaccctgtcaacctgctcccctggcccctggctgcctcttattactatcattcaaacaggggtaaagttatgtagcaaggtgaccctgtccctccattctgaggtggatggggaggctggagactaagtaattaacacacagttgggagtaaaggtgcccagggaaatttcctgcagaagccaagcctggcagacgggaaagctcagcaggagcaaggcagtgaggcggggcatggggctgggaaagccatgggcagcctctttgcactttgcctacttttgctctggtaagaagctgtcatggtgagggcagtgggggccagggagagggaaagtgcagggtgctggacagagagaggagcgggacccaggcctggagagaaaggtcattctcctctgggttctttcctgaagagggacagccactacagtccttggactcccagccaggccatgggcctcctggctggaggagtaggctttgaggagctcaggaggcttctaaacacagcacacacacaacatgcacatgcaacatagcaacaacagacatgaatcacatagattggcaaacagcaacacacagtaccatggcaggcacacatgctcagccacacgcgccacacacaagcagcaagaagttcacaagcatggtcacacatgcaggggcacacaatagcacatgcacacacacatacagcaactgcacccaagatttcttccacatttttccaaggaactggagtctggaagccaacttctcagagagaggcccctcacttccctgcctcccttctgcgtgactttactcctagaatccaggaggggcagctgtgagcctcactccaaagagactgaccaagcatgggaccaggtgtccagagacacaggtccgtgcctggctctgcagccctctgtctgggagaccttgggcaactcataatgactctggccactttcctcatctgtccaaagagtaagagtaagaatagtgcctattcatgtgatctctattaggtctgtaaaagcactttgtaagtcacaggctacctagagatatgactccccagactagggtgcagagccccactctcaggcacacacagccctccaagaactccctgctaggctcctaataacattccagccagccaggtctgatcccagttaccctcaatacaaaaacccatacccacaaagaccttctcattctaatttttgctttgtgtctaatacttgctcatgtattcattcattccgcagttacaggatgctagatacaaggtgctatgtatgatacaaaaatgggcattgcctgacttttgctctcaggcaactcatggtctagctcagcattctccatcctggttagcagtcagaatccatggcctggaaagcttttaaaacagctgggccctatcccctgggattcatagtcatttgatctggaatggggctcaggcatccatgttcattaaaatcccccctccctatcccatccggtgattctaatgcacagtcgagactaatacccatccaactagtggagaaattagacatacaccaaaagacagaatgggacgttttacaatggatggacacacaataataatagctaacatttactgagtcattttttgcaggtgcctagcactgtgccaactcatacattagcatatttagtcttccccaaaacccagtaaggcaggccccattctgctcattttacagatgaataaatgaggctccagagatgaagtaacatactcaaggcaagactttgtaaaggtaacatttatgctgaaaagaagacagaattttgccctagagagacagagaaatggaagaatgggcgtgttctccaccctggctgtcattagaatctatgacctggaatgtgtgggggtgcagtcagtggccctgctgagcggggcactggaattctgaaggggactagagggagcttaggtcacaggggctgacaggggccaaacgatgggaagataactttttatggcaaataaaacatagagctactttacccaacagataacaattatgtacctgttgtgattatccctggaagtagcagggatgaaaatagaatgtcaagatagaatcagagacagtggacccagaaggagtttgctgaggggccgggggggattatccttaactttttgagcactggcaaatagaaatcagccaccatacatcctttattcagaagcaacaaagtgtgaaaaagagagctttgaactgggggtcaaaggccaaattccatattttttcctctcttaacctgggcttcatcatttgtaaaatgagggcagggattgttgtgtctaagtggttttcacactgagttctggcagccagtgtctcagggagaagctggtgagggttgaggggtagcaagcgggggtctctaggcctcatcctctccagctgggtagctctgctttccttggctttacacgttggctgtcacagaaagtttcctttgacctggaggttctgcagctaaaacagtttgaaaatgcagctttgacttctagttaaagatggctttatctcctttctccctagaagcccctaaaatgatagcaaactctgcaggggctcaggccttgaagacaccaggtgcagggaggtgagaatgacacctggagctgcaaatgaggatgaagtggaagtctgaacagaaatcagtgggagcctcgggccctcctaaatcatagaactcttcactgccatttatagtgggggagaaattgtgataagcaggggttggaggggagcttaaaatgccagtatgctcttcaatggcaggtgcaggctccccagccagcactctaccctatcctttccacaagtttcactgctaaacacaaaacttccaatgagcttttcagaaccactcatgtatttgagaagagatattttagatgtgcgctggggatgcttccaggcattttccatatagtaacttttctcatcctcccaacaagtctgtgaagtaggtttctattttgttcccattttacagatgagtactttgaagaagaaagaagccaagcccaagtacagttagccatagaactgagctccatgcctatgcactctgcctctagactgatgtagggcaagtgagcccccaaattgggacttagaccggaagagttcttggcttcacccaggaaataattcaagggtgagtcgatggtttagacagcagcttttattgaagtggcagtgtatggcagcaacagtagtttccatgccttctccatgagaagaacatccctgggctagctcactggtcccacgaggaaggtgtgagacgtttggagcagagttaaagtccgccagccaacactaccctaaatcagccatctcctactctgctcacagatgtgtaggtaagcccagtcaactctagcaatgccagtcaaacaagttcagcataaattagtgtccctcaggcaaccacagatctgtgagtataagtaaccatgtcttaagccactgagtttggggttggtttgttatatagcattattgtagccatggttaacttatgcgagtaacaatccaggaactggtccccaattaatggagaaaatacaacaaagggaattatcaaagaaataattcaaggcagtttcctagcactaaaaaatatgaaccttcagattaaagggcctaccaagtggtcaaaacaaggtaaatcctcttcaaaacagattattgtaaattttcagaacatatagacacagatatgattctaaaagcttctagaagggaaagtaacaggtttcatacaaaggactatgaatcagatggttgtaggacttgttgagtgcaacgctggatactgggcaacagtgaaaccctgccttctaaattcttggggcaaactattctcaatatagaactctatagctaaacacatgattaaaacataagttgagactttaaatatgttctagatgtgtaaggattcagagaatttactttgcagagtaccagaggatatgtttcagcaaaaattagaagtaaaccaagaatatagaatccaggggattcaacacgggagagtagcagaggaaattcccaggacgtgagcttcgcagcaggcataaagagtaacaggccaggttgaaagaagaaatccagagccccaggagggaagactccagggaaagaggagagactgatagatgctatgatgtaagacaaaacttatgaaaataatcttaataataatggtatggcagatataatgcaacatttggaaacatttaagaaaacgatgcaactgaaaatatggagcaattattacctctgggtatatttatcaggatagttgatgctagatgtcgcaatagatataaatgtttatttccctttgtatcacaatctaataaggaggcagtccttcattttgtgtttgtacagcatggagcccacaacatgtacaagctccttgctagggaagagaaagatggaagagccacacgggctcttagctgcctcaactcaaaaagatcattctagtcacatggccctaacctaactagaagggaagctgaggaatataggggaacaggtagatattcaataggcactacccgtattcgccacactgaagggggaaatgtatgggaaagaaaatataatcagagcccattgcttaactctagagtgagcctcatttatacatttataataatgttcttggtttgactaaaagttgcaataggactatataaggaggaaggggacagaaaggtgagtaacaaagcaaaatctgtgtttactatagcaggaagtcaatagaggatgtctaaaactgacaaagcagaaatagcagaatatgcatattatttagaaatatgaacacacagagcaaaagaagcagctgaaagggctaaaaatgtgttgtcccaggagagcaagagtagcagtaggaaggttggggggaaagatagtgcttttttattttaagtcttttggcattaaaaaatttttttgtttttcacatatcttatttgggcaatttttaaggcaaacaaaaaactaatgataaaaatgccctgcattctccaataattaagacttgttcagttctgacctcctagggttcttgaattctaagcatccattgtgtcacaatgcagattcatctgaacacaaactgtcataggccctgggttggagaagtcaaaacaaaggtcaccatgttgttctgagcctaaggggtctttgtgagatcttgcactacaaactgcagccaaggggatcccgaatgggcaagacttgatcctcatactggtgaaacctcctgagtccccagggaccctgtcagaccaggctccagcctccctgcggtctctgagagagaatgtggctagttctgccccacggctccctggcaggtaccacgggcatcaggtgtaatgagaagtgacaggcgcaattgctgggggaacatcccagcttagagctgaagttgcccagagtagctggagggcttttccagctgtcaagagggtccccaaacacttggaggctgcagtcagtctggttttcagcattagcatctcattagcatgggctgaggccaacctggggcccggtcaacagcccagctttgtgtggagggaggggaaaccaagaacccaggtggacagaggggaggagtttagcagtctcaccttgctccctcgtccagtccagcggtcagaagtggccacgcagaacccaacattcagcctgggtgcagacactgcctctagcctcctccccaagcactctcctagtatggtaagagaataaactgaagtccctagaggccaagggtctcacctaagtggtcatatcctacagttttaagtctggagcatttctccttatagtttctctgtctagaatgttcttcccccatttcttcagctaaatcctactgctcctttaatatctggtcgtagttttgctgcctttcgaagtcagttgactctaactaggtcaccccatttctggacagcatgggtacaatatcactcacctgatagaaagaacatgaggctgtgaaaagtttttgcatacattcaggagggattttcagccatgcccacccatcctctttgggcttattgactcttccctgccagaaggaaaggcagttagggagctgtagtcaccaaacataggaggagaggacctaagtgcccaccccacctccattcaaaatgtacctgggccacttctcgccaagtgcccagggaaggaaggttggtcagctggtgcagagaggtgtatattggacaacagcagggcatagctggaaggaggggacctgggttcaaaacagattttgtgactgctgccatagaacctcagctagttccttcctgagctagtccctcagcttctttgaccatggaaagaggcgccagatgtgacattctcttgggggtcttcctgctatgacagtctgtgacatggggctggctggctttctttccctttctttctttctttctttctttctttctttctttctttctttctttctttctttctttctctctttctttctctctttctttctttcttcttttttttttttttcaagacagggtttctctctgttacccaggctggggtgcagtggtatggacacagctcactgcagcgttgacctcctgggctcaagcaatcctcccacctcagcctcctgtgtaactcaaactataggcacacaccaccacgcctgtctaatttttgtattttttgtagagacagggtgtcacctcttgcccaggctgatctcaaactcctgggctcgagtgatctacctacctcagcctcccaaagtgttgggattacaggcgcaagccactgcacctggctgagacttcttgatacccatttccgctgatattgagatgcccacagctgataggtctctgtctccatcgtcctgtttccaggcaaaacagcccttgagagattgcagaaagccatcaaccttgaagataacaggagccctcccaaggaaatgtgttcaggagaccttctaagaccatgccatttcctgggtccctctcccagtggggaaattctcccagtagcagattctggcagacagcagagacacactctatgcccaacactaggcaccggatggatgagataatcataaatccacaaactgcaacaagataaaattatcattagatgaagttaaattattaattagcacctccaaaaaaagaccggcaccacctgggcttgaatcttggaagctgtctttctgaaagcaagagaaacatcaaaatagtttatcgatgctctgtggtgtgggtatagcctatggttcccagaagcctgatggtcagaggtcccaccaggcaggcctgccccgcctgccctcttcttgcagtgttgccagaaatagccagtttggataatgttactagggaaagggaagcaactaatgtgacccatttttatgactggagaaactgaggcaaaggacgaggcagaaaggccacagaagatggctcagggtgggctgaagaatttgtgtactgggttgggaaggggtaggtcctcagattgcctgattatctaaggactaaggaacactcattcgttcagtgcactgctattttgtgcttactatgtgccaggcacccggaatacagaggaaaaagccataattccttgtccttaagcacaatgtctgatgggctagtctgatgaatcagctgtttctcctctctgcctccccagcctcaagtcctaggacttagcctctttatcatcagccttgtttccatcattgtcatcatcatccactaccaccaccaccaactcctacaacccatatttattcattgaatcctggaaccacagcagctaatgatgggggaggaggctttaaagaccatctttctagccagaacatcaatccttgctacagaattccgtgtgaattgtgatccagtagaacactcccagcaataagcagcttactcactgcctcataaatcagcccattgcatctctggagagcaattcctcactcattcatttattcattcattcaacaagcatttaccaagcatctactaggagccacctcagtactagttcttggaggtacctagtaaaatgtgatccagtaccttctttaaaaatctcccaggatgatgagaaaggcaaacaaccaaccaagcaatgacaatccagtgtggtctggaggttgagcactcattccaccccagcactgtagacgtctgatctccattgctctgtgcacagcagccctgtgaggcagaagccatcgctctccccatcttacaggtgaagaaccttcagcacaggaagattaagtaacttgcccaagcttagtcagctgtaaagtagaagggtcaggatttacacctaagctgtctgactccagagttttgtcctctgccccttatatgaaatgtgtcatcctcttgttgattgatgtaggccagcctgccaatcagcccgctgtcctgagcaccgatggtatgctctgtgcaggtctctgcgcttgaaggttggggagctctcaccccgaggcatcctctgctcccctgggctcacaatgggcagatcactctggatccaacaggacgtgggtgtcagcttgaatggagatgaagacagagacaactctgtgttccacatgcttcctccacgtgccctccaaatggcacagaccgcatggcccaaactctcctccagccccaatatctaccctggctccagccaaatgaggcctgaataattcatggccaatgcgcatggcccagtcgtggagcagctttctggtggctaaattggagagcagggtggaggccagggcagctggacctgggagggggctgtggtggggttttgagagccactaacagccaggaagggaagagtaaacaaggtctgatgaattattcagccaggcagctgctgatgcagcccgggggtggcatgacaatgtgctaagtgggacgtcaccactcaccaggggccagcctggcatgtccagtgtggccaggctctgaccagagcccagagggcaagaggaaactggagaaagcacagtcacagcccctacctgggagagtggcagggaccagatggcggccagagccaaaccaaacctgcatcctggtcatgggtctgctgaaagtacaggcgggggtaacatgggactggaaaagggtggactctagctgagttccaagcataatcaaagcagtgtgctctcgagaaccatttaacctcagttttctcaactagcaaatggaaagcatgagctgggttggggtaaaacctcaaatgctaccagatggttggaataattgctttgccacaacctgaaccccacaatcctggcacagcactgagtcctttcctgagcacgtggtggtgaatagtactccgttcaccctacttcccatccctggagcctgccaactctctgggaccccagaaacatctttcatccctccctgctgtcgtctcacccacttcacttcgccggatctcctgggagagggaactctgccagtgacccctgatataagcgtttgctcagggaggacgctgaaatgtctgcaagttctccacagagccatggcttcatgcccccattgtcagcagcacaggcaagaggcataaaactggccggcagagacctgctttccccccagtgattgctgtgtgaccctgcaccagccccgttctctctctggacctctggacctgggggtgtggggctacacaagaaggtccctcaggttcctctggctctgacctcaatgaaaataagatagatgggagagaagggctggatgactgttccccccggcagggctcctggggcaggaggtgggaggagccagacttttctggaatccacggagtaggggtcaggccttccttcacaaggttctagccctttggtttctgttttccactgaaagtccccatgctctaatgataacagaaaaacagtaactaccaacagtaagggctccacaggcccacactatcatggcatggggctcacagcctcacaaggcagggtcgtgagcatggttgtgattccaagtataaagatgcagcagcagcagcagctcagctcagagaagttaagtgcttggtccaaggccacacagccagcaatgagcagagcccgttccagaatcccagaccagacctgcagtctccatcattcatgtgcgacgctggcttccaaagtaggaccacaccaaatcctccagcctgctccccagcacggctcccggaggctgggaggctgcacagggactcagcaggtcattagtcatttggtaaacttgacaaggatcaagtcctggctctgccactcaccagctgtgtgcccttgagcaagactctcacccactctgaaaggcagtctgcgtccctggaatggtggggtaatcatgctaatcccagccccgtgctgcagtggggctctgacaggactgccctctgagctcaccctctaggtggcttgggcagctcaaggccagactggctgagctgcatcctgggtaaggagacaagggaagaagaaggagggcatgctgggtgggagcctggaacagctccctaagtgctcagtaataaataagtgatattggccacacctaatgcttccacagtgcctgccaggcagagtgggaggggtggctaatggggaggtttattataggcccggccacctttgggtcttactcacatgtcgaccctcatgcacccttaataggttcatgggtggcaggctgactctaagggcacagggcctcctccagagctagagggccagtacccagcaatgttgaccccctgggggaggttcctaggagcaaatggcaccagatcggcacgggctaaggcatctcatattcttccagtcatggtaatgagggagagagaaggggagtctggatgcctgggttctcagccaccctctcagcagtgctccttatgcccaaggcctcagtttacctgcctataaatcagagataatcctggagtttgggaagccatggtccaaatgaagggctgttggtttctccaccagaggaggctggtaacatgccccaggaactgagacttcctcagttggggaagagcaaagctgcaacagcccctagagaccatctgcctccttcagttgtacagcagggcaaattgaggcctatggcatcccctgtcagcctgctggggctttgcagacgcagacgggaaggctctgcctcctgaactaaagctcaccttggaaggggttcccggagccttgaggagctggagcacactaggctgtgtgtggccagctgtgtgaccttcaggaggctctgcctctctgtgctcctgtgtccccgtctaccccatttatcgcaagcagaatcatcacacctcagtttggtgttcccattggccatcttcaaaggtgccagaggcatgcactaagaaccctaaacagaatggccttggctgggccaccacctcacacgagaggcagatgaagagctcatcacgtggcccccactttcctgtccataagcgagggtatggggcttttgaagctcctctcttgtctaagagtctatggccagaaataatctggtggttcctcaaataaattaaaaacagattaccatacaaatcagcaattccacttctgggtatacacccagaaaaactgaatgcagggacttgaacaggtatttgtatactcatgttcattgcatcgggatctgcaatagccaaaaggtggaagcaactcaactgtccatcagcagataatgggataaacaaaacgtggtagatacgtacaatggaatattattcagctgcaaaaagaaaataaattttgacacatggatgaaacttgaaaatgatacgctaagtgaataagccagtcacaaaaaaggcaaatgccatatgattccacttagaagagggcacgtagagtagtttaactcatagagacagaaaatagaatggtggttgccagggtttggagggaagaggaagtggggagctgttagatgagtagagtttcagttgcgcaagatgaaaaaattctggagattggttacacaaccgtgtgaatatatttaacactactgaggtgtgcacttacaaatggttaaggctgggtgtggtggctcacgcccataatcccagcactttgggagactgaggtggcaggattgcttgagtctaggagttcgagaccagcctggcggacatggcgaaaccccatctctagaaaacatacaaaagttacccaggtgtggtggtgtggtgcctgtagtcccagctactccgggggctgaggaaggaggatccctttacccaggaggttgaggcagcagtgagctgtgactgtgccactgcactttaacttgggcaacagagccagaccctgtatcaaaaaggtaaaaaaaaaaaaaaaaaaaggttaagaaggtaagatggtaaaatttatttatgtgtattttgtcacaatttaacttaaaaaaaaacagaaagagagcctatgtccaggagctcaatgcggaggtctgctacatcttgcatttcaagtatatttcctaaaaaaaaaaaagagaaaaagacaccaaggagacttgttctttgaatgaaattgttgtacagccttttgtggcatgaagaattctgtgagtaagaaaagcatcctcatccagcctgtctgtgtcggttagagactagcacgttttgcaaaaacagcacattttctcctcatgatgcgataagcatcgagctggcaccctacctgctagtgtgaggctggcgcatgaagcactcctgctgggagagtaacagccttggtactcaaggccctctgtggtctgcaccatgaatcctgggcagacgtcaccctctacccaccccagacctgcatgtgtcaccccttggaagccgccctgagacccccgcagagccagcttctgttccctctgccacttcacagcctctgctcccttggtttcttggttaatcctcaaggttcctgcctctgcctccccaaccagattgcaagctccttcagtgagggtctatgccctattcaagttgtcatagcccctctcctcacttccatttcagcatgtcacacagtagggtcatgtgtgtaactacctcaaaacgtctgtgaaaacaaggaataatcctgcaatgaatgtcttcattatctacccagattgacaaattaagtccaaattaaggccccagctgtaccactatggacaggggaatatttgctatatctcttaattagaattataggtgtagggagtacttgctgaggcccaaacattgactaggtgctttccattctaatcttttaaagtccttccaagagcctttgtaagttgtgcctttggcaccgactgtgcctgttttacagatgaggacgttgaggttctgagaggttaaagaccttgcccagggtctcccagctagtgactggcaagttgaaattgaacccaggagtgcctattttcacgacaggtgctgtgtgagctggttgcctcctgagctgctccctgtagcactaaggggctcagccacagccacagccaccaccaccgcccagagctgaaggctgagctgggcgctgcggcttcacttggcgccgccctccctacagcctgggagatgagtggccctgcgctgcctcccctggttagcgccctgatggctgactgattggctgcgcggagctcacagctgctgctgctgctgctgcctcgacaattctttgaattagctccatggctcactgacctgttggaaaagtaaatgcaaactgcagaagaaggggaagaaaacactctcctgcaactgccgctcctcccactgccccagcaaagccgctgtttcggcaaaggtgttccccagaaaagcccctaggcaggagcaggtagagcacaggaggtccccaggtctcaagatgggttgggtccatggaagatcagagctggagaggtcttgggaggtcttccgcttgcgtccctccaggcgggtcaggagggccgcactgcaggcatccacagagttgctgactgggcttctcctgcaagggctgacagggagcaccaagtcagtagggagtggggagcagcggccagaaggggagtgctcacctctcacctcagttttgaatgtggtgacagctgggtctctcagggaaactgaggcagggctaccttcccaagtctggcacctgattcaattcctacccagcacagagcttagggcaaagaccctggagagacaaaaactatggggctggatgcctgccccttgagggtgatgaggctgggtaccaatggctgacatccaaggcggaaggagaatgatcaataccttgtgtctgaccagaccttggacatttacaaagtttccattaatccctaaacaatcctgagctacagcaaccaatacttattgtgctctaagtgcaaggcattattctaagagttctacatgtattatcacatttaatccacataacactgtgggttaggtataattgccagcatctccatgttacaggtggaaaaactaaggcacagaaaggttaagtaactttgccaaggtcagagctagattgagcccaggcaatctaactgaatccaggcgtaccatcaccctgctccactctttgcagcttctgaatgatcatggtgctgggcactgggcaagtgtttctactcataacagtgaggaaacagaggctcatttaaagaaaccacctaaggccacacagctagtaaaaggtaaaggcaggatttgaacctaggactagctgactccaaggtatgccaacttttaaatgtcatgattttgcccctctttcagatgaggaaactgaggctccaagtgataacatgatttacctacagtcacaccctgcagccaggtagaagagttaagatttgagcccacatccttttatttcaaatccaaaaaacacacaagttcagagaggagaaattctattctactgacaaatcaggaaaggctttctaaaggggacagcattaaaggaccttaaagtagggccaggcagaggggaccaggtgagcaaagacacaggtgctaggaataagagctgcaagcagccaagtctggaggaagggcaggacctatgtagagggatggccaaggtaggagagactggtggatttaaagcctttaccatttgccagccatgtgaccttaggcagttaattttactaccctatgcctcagtttccttatgtaaaaatggggatgataataatacatacttcgtagaggtctagggagggtcatataaaacatgaagaaagcacttaagcacctcctgtgtgctggtcccaggctagaggcttaatggaatatcactgatgtcacacaaattcctaaaagtgagtgttattaaccacattttacagatgaggaaaccaaggctctaaaagatcaagttctcagctaaggtctcagaactcataaatagtggaggtgggatttgaactcacgctgaaatcaggaagaggcttgatcaatacatcagggaatgtgggccttattgactggagcttctgggcagtggggagtccttggagtttggaaggttgggggaagtaagtgtcagtggccaattctctccctggctcagcagtgaggctttccaagcacctgtccccacctcctcacctgccactctcagttgctcataggggtcacttcttcctatccttggatttcaaatctaaaaaacacacaagttcagaaaagagaaattccattctgttgacaaatcaggaaaggctgcttctcgtgctaaataaacaaaaacaaaaatgtggcttaattaagaccatggaaagcaggtgctatctcctctcagtagagagaggacagagtaatcagatcaaaatgtaggcagatattcagaactgggcacagttcaccgcctcaacccccatccccaaaaatctggctcctggctattgtccctcacctgtctgcctgagagacggggagagatgagggggtgcagccagggaggagagtccaaccttgtgtgaaaacccttgccttgttgcagctgacaccctcaggaggctgcattccacctgacttggtggctcagggcacaggctctgaagctagactacctggatttgaattcttgtcacgtgccagctgtgtgaccttaggcaagtaacttaacttctccatgcctcagtttcttcatctggaagatgatttgaacgaggctaacagaggttgacctcacagaggttcctcaatggaacacgtgttgaatgcttagaactgcctgcgaaatagaatgagctactgtgtatgttagctattattattactattattattaatggacagatggcccactcaaaatggatagaagtcctcagtcttccctgatcaggcccaggtagttttgtctgtggctcatttatagcccagctttccacttcctcatgcatgccacaacctacgctcccgccaccaagaccctcttcccctaaacactcctcctgtccctcaggccctcatgcctgggcacatgcccatcctcaggcccacatgccctttctctcccatgttaacctgaagttttcttgctcctccttcaagaccaagttctgttgcctcttctgtgcagattcccaatctcctcccagtcctccctcacttcctccatggcctccagtacctggcatacacctcaccacccaaaccgtcccatgactctgtgcacatggactgtctccaccaaaacaggtgcctctgagggtgaggacagtgtccatctttatatccacaccccaagccccagggtctaacccagtgccatacagaagtaaacaaccaatctgcgagaatgggaagggaggaaggagggaaggaagtaggggagggagagagaaaaggcagagtaatgccatttttccaatgagagaatgataactcctagtcctactctccagacaaggatctggggtctgggaggaggaaggggtctgaggtcagtggggaaccctgcacgtccctaccatggctataacttgaggcctctgagttcagagacaatgacaaatagagctgaaagtcattaatggccatcaagccctactcacccattttctagatgaggaatctgaggcccagagaggggcagcaaatcatctaggttgtttagggaattcatgtcagagctggaacaagaattcacgtctctgttgaacaatttccgctgtgccatacagccaatcctgttctccaggccctgtgccctgctgccccaccaaacatcttcaggctttgctgggtgtgctccatgaatgtaggctggtgacagaatttgcagggagtactgaactacaaggctgatgcccttggttgaggccaggcttaggatgagttagaaagagaaaacattgacagtgttgggaaacctcgaccatgggacccacatttgctactgttgatggagaccccagagatcctccagtcccacctgttcatctttcaggacagggaaataggtaatcctctcagcttcaaggtcttgggcctcagatctgctgcatggctggccagcccagcccagccatgtccccatctcctgcaccagcccctgccccaggaccatttcctggactagagatggttggcatgatacactcatctatactggtttcttcttggccatccccattccccttcccagaatctcagagacagacagtccatccctgcccctgggtaaagggctggctgaaaccataccaaagacattggattttaaaatgggtgaagtaataccgatgattggaaagagagtgagacagtgctgaaccagaggggcctgcttcttccaagatagcagagcggggtccggtggctcctccatcagtcctctgctggagcttgctctgtcagggatgctgggagcaatggctgcggaaaatcttgtgctgctccctgatgaaggtgacgatgatggtgaggaggaggaggaagatggggaggaggaccagaagaactaaacatcagcagagtgtcttccgagcacttgccctgcagcagacactgcgttgagtgctttacttgattgtacacatgatctcatttaatcctcacaacaactaagaggtgaatattaatttgcggatgaagaaattgaggctcaaggaggttaataacttgccaatgtcaaagatgcagaaagtggtggagccatagtcacaagtcctatgtgattaactgtctcaggtggagggagagagagatgcacagaacaaaacagacatgcagggaaagacctgcaaagccactgagtcctttccaatccccatcaattttcagaataaaaaaaccaagttccagagggtgccatggcttgcctaagattacacagcaatcccgcaggatggcagccagctgggacttaagctcaggtccatgtaccggagtccgtggtcccaccatactgccaagtctctgaagcccctggtgcaggaaatggaggaagatgacaagagttatctgcctgcacctgctgctggccgctttgtctcctcagggaatggatgtggcggcaagagaaacacctcacagcctcacacaaaagtggaagtttgcagtgaggggaagctgaagatgggggtggagaatggactccacaagggttcccaggagaactggaaaaatgatagggactcatgcctctgcaggtagtgggggcttaccccggggacattcagtgttgctcaggccctgctctgacaaaaagctcagactagctgaaataacatatatatgttatatgtatgacaatatagaatatatattatagaatatagattatatagaatgcctagcagggtgcctgatatacagcagggctcaaaatctcctctggagggagcttatttatttattacccaagtatttattgattacctactatgcatgatgtagcacccatgaagctccttcaagcatccaccctgagcccacgccaaggaccaggcactgcgaagctcgcccccagctctctgcaaggttgcacggctttaggctcctctcacgcccagcttcatcctcttgtgtgctccagctggctctgaaactcccagtgtccacctccaaggacacttgcccacccactaaacatggggcttatcgccggattttcctagagttggatttcttgaacccaacataggggtcaacccatctaagggtagatatagacacacaatttgtattgtataaccataaggaaaaggcaaaagtaacttggaagacagttcaaaagttgtgagatgcattatcgacttcctagatattgcccaggtgcctcctcaaccaagattccaatagattctctggctctggggtctcaactggccttggaaaatgcacctccttggtggatagtcatcctgcttgccttccttacctgcccagggcagaatcaggtgtgaggcactatgctatgggaatgacagcacatctataccctcctggaatcttcctgcagcactacaaaagagcttgggagtcaagcagccctagttcagttcccagctctgccttttctagctatgtgactgtgagcaagttatttaacctctccgagcttcattccccacaaaggaagatgatagcaattccttacctgtctcctggggttggtgagaggattaaatgagataatacaactagaaaaacttgcatactcctgaatcacaggaggagctcaataaatggaagctgtgattattatgctcaagtctccacctccaaatcaattgctctgtttctcaactctccctgcatgatgtcagtaccatgccctgtgggaaacagaactgagcaaagtcttctcccatggctgatctccacccacaatctcagagggtcagggcagccacacatggctggggacagctgctggttccattagcagccagagaaaggagcagagacgtgcattcctctaatagccaggttattttccacttcacccgctgatagtggaagcagagtgaacatgggggcagaaggcgagggagcctgggaagaggcaatgctaacagaaccaggaatgcctattctccaccccaggcccctttgttcatgggccccaaacaagcagctcagagactcctagtccaattccggccccttagatgctctgccagtttccctcccagggagagatcaagctattagccagtgtgtgaccacccaccagagtcaccttagtctcagccttagctggcaggacaggaaggtacttgttgaacttccatttctccctgcctattctccttggaacttagaattgcagacaggcctgaagattcctggggacttagctttaccctgctggctctgagtcagagacttgcagtccagaccatggatggctgcaatcgggcagcaagcagcattgcagcctcaatgggaggaggtccaggtgaccagaaggagcaggggcaggtgaaatgctgaagtctgggcaggtggggataaggcaatatggctgcaaaaagtaaggagacagctgtagggacaggacccccttcctagaagaacccttatcccagaggaaatagtttccaaacagaagtaccaggcaggcccttgatgacagggttggcaagagccagggccaatagtcggagctggaccagcagctcagctgggttctttcacattcctccctcccaaggggcagagttggtcctcttctgagtgtgactgaggccacagaaagaagtataggagtttcaggtgatccagggacagggcagacaaccaagtcaggggcacactactggcttcactggatgccagtgtggagaattagcatatatctattgtgcccctggtatatgctcaacactatccaaagggtctgagttccatctatgaagaagggccaggccaggtaagaagtgctgaccacaggggctcaggaatgggtctcctgggagctgagataagcaggaacattatccagagggctgacaggatcctcaaagagcaaaggcagggaggcagagccaaggtggggaaccagcagcggccagcttggaaacagaacaagaccgtaaactccttctgcaaggactatccatgcatggcatatacaggaagctaattaaatattcattaaatgaatgaatgaaggagcaaaccgttaaagattaaatgccacaaatcctggggctatggcttctttttctgaattcttagagcacttcatgcccagtccaagtacccaactatgcctgagccaacttggtaccacaattatgtttcttgtgtccacctctctggccacgggcaacctgctaatattgagagatccctggtctgggtgtcccccaccctgagtgtgccttctaactgttccagactgatgtagagccctgggcaaatcatccctggggcttcaagtacttcatttttaagtggtggagtcagacaagaagatcctccaaggaccctaatggcatgaatatcctgattctgtaagacataagaaaagtgctgatctgtgctcaactgtccctggcattctcacttttgatttcacctccttctcaatgcagtcctgtgaagagagctccccaaggcagcatctatgctttaagcacccccgagttcccagccatgcccggcacagtgccaagcatactgtaggtgcatagtagcacatagcctcatagttcactgtgggcacatataatacatggtcagactggtagctttcagggctagaatggcatgaaagtgatctggtccagcccaaggccaccaacaggtaatttagttcagaaccacaaacacttattcagtggctatagcattcaagcaccatgccaggcacagtggtacacagacaaaggatctgcaaagaaaacattgaatccctttcctacccttctgctgtgctgagctgaactctctccccaggagagcaagaccccccaggtctgagaagaatgcactctaccgagatagatgcagagccctctgtggccaagggggctgggcattctctggacaagcagaagcagctgacaccaacagaattgcacttcacttggcagacaggctaggaggggaagacaaccacttcccaacaacaagcattaggagacaagctatttgaagtacaggattggggtccctctccctggacattgccagggtacccattagctatcagcattctttccctccaatcatccttctccatacattctgttcctctccgtctgaagttggtccatgaccacagacagcactgggcttggacagctacgtgggaccagtgacaacagagcaggggatggggaaaaaaaagccttttccagaagggagaaaggggcagtggaaagaagttcctctccctcccccaagaaacactcactcccaatgccaaatccactttcaaaataacaggaaaagaagtgcaaatgctggttcctgctttgagatgaaatcctccttcctctgtctctagactccattaagcattctggaagagatggaaagtgattatgggaaaagagagagggctcatggcaggggaagagagggaaggagagaaggcggacgacagctaagtgagcccaggcacatgcctgggtgcgcgcacgcacacacacacacacacacacacacacacacacatacacccaaagatccccttatctgattaagaatccaagggaagttgaaaagctttgggaaaattaaaataacccaccaggttaaccagccaagatctgcaggcagattatgaaaaccaagtggagtggggatttcctttgctctgggtgagttctccaggctctagttcttaggccaaaggacagcaagtcagccaaagagatggagctcagggtggcatttgccccactggggttccaacccttatcacagcagggctgtggctgttgcctgcacccaagccaatttctttgcaaggctcagaggaaaatggagacaaggaccaggccttcatctgcccagaggcttgaagactggatgccatttcctccttccctccctgatttctggttctggcctctatcaaaaatgcagcggtttcgggtatggatgcaacatcttccctagactctgaccaccgaacagaatgtctaggaatgttgtggctggcctgggtcaagctccactctgccatcacctgcaccagtgactttaggcaagtacctttcctctctggacctcagttcttctggctacaagtgggccataggactcaatgctctccataggcccctgtagctctggattttaagaccgcctgagagtaggactgcacccttcacagggagtttgtcacactgcgctggtagatccttgactctctgtccctctgtgatagaataaacaggatgatcgtgagatgtgtttcttctctcagagctactgaggcaggcctgggttcacaaagggagaagaaagtttaaacaccacagagaacatcagcttaaaatgggaacagcccctccagcatgcctgcagagctgtttgccgagctctataacatatttgcaaacatgccagaatacacatattaggaaactaacaagttgcctggcattgaaaatatattatacacaatgtcagatatatttaatatgcatctgcaatgatccttttttctctgcttgcaatgatatactttgcttttttttttttattttgaagagttcatttcccatgatgttacaaccagccagtggtattaacttagccacttgaccaggcccagcacagcatggtgcacactgtcagcactcaatagatgtgggggtttccgggatgcacaaattaaaccccctgacaggagtgactttgggctctgtggtcacctggagccaatgaggactgcggctgcgctcttaatttctctcccttggaggatgcagtaagaaccttggctttattagctctggaaatattacttcatcctcttggggaacttcttgtttcttggcaagttgctcctggaactgctctagctcaaccctgaggccttaaatgttggatttctcaaatccaaagaaacaagaaagcttcaattctggattttcttcttttatttttcttttctacttccaagtgtcagattcctgggctgtgaaaaggaaggtgctaatgaccattttcagggttgctgtgaaaattcaatgggattgtggacagggaaggtatttgcatttccttctttatgtgcacacacagtcactcaacaaacactaggtatagattcttgttacaagccaagcaccatgctaggcagtagggatagagttttctcgatggtcctcgctcttgaggaacatagtcaggggaggaaacatgagaacaaatgataacactgcactaccaaaggaagagggaaaagccacatagcaaagagactctagaccctgaagacttgggttcaattttacccccaccccttggtgggtgctctaaaatgttgggtaagttacttaacccctctaagccttgattgtttcacctgcaagatgggaagaggattagctattctctagagctgttttcaggactggagttataaaagtgcaccacagcacaatgcctggcacaaattgagctttcataaataaacaaagataggaaccaagggtttcagacctatggaaaggggagctaagaactgtacctagaaatgtgagggataccttttaaaagatgcggcctttgagtgagatcttataggaaaagaagatgtttatcaggcagagatgggggaggagtcacagggcaaagaaaccacataaacaaaccacagaggcatgggaacactgaggaacctggggaacaatgagaagttgggaactgctggatcctgaagtgcttggaagaggacttgagggatgaagctcgaaatatgagctaatatctgaaagcaaattggaggctgttggagaatttagacaggaaactttcataacaagatgtatttcatagatcaagccccgagaaggggagtgaagcaaagttgagctcgggaggggagattgcagactaggaggtggcttcattgatccacataagtaatgatacatgcttgaaatgaagtagtggtagaagtggagaaggaggagttagcctaggagacactaggtcttaggaagaggagaagcagtgggatatagaggatacagaccaggagtctggcatgtgtgactgggaaatgcaggggactacacagagcctgagaatacagggaaaggagcagaattgggggataaaagagaatattcaggtatgaatatattgtggtaaatgggtgcttgagatgaggaacccatgtggaatagtcaagaaaacagctgaataaacacatttggagtgcagaagcaatgcctgggctgggaataaggattgcagagtcctgtaggttcaggcatttgaagccagggagggtgtaagttcttactagagtaattgagggacgtcaggaccaaggacagagctgtgtgactgataacatccattgataggaaaagggaagggcagagtactcacctaagactaagaagaattggtcagggaggcaggcaacaggtgagaggcatagagcttctagaaggaagaaatagccccaaatgtcacatgttgcagaggggcctggccacacccctgccccctttagtttattctctacacagcagccagaaggatgcttttaaatgtaagtcagaccactcatttctctgctccagtcctttgatttcttctcttctcattcaaagttacagacgaagttctcaccccagcctgaaaggctacatggccatgtccctgttaactctgaccctatctcctacgaccatcccctgactcactttcctccagaaacactggcttccctgctgcttcttaaactcaccatatgtactgctacatttgcacttgctgctccagcacctggaaccctccatcccagcatccacatggctaccctcctcccttgttttgtttcagttctcagttcaaatttcatcttctcagagactttccatgaccacctaaacatcatgcgtcttccacgattatctccctcatcctgctctgttttctccatagcactgactgccactgcctcattgtttccatgatagtatgtagtctgtcaaccttgtccacttggatgtaggtgctatgacagcagggactcgcttctgttttgttcattactttatctctagggcctagaatgatgcttaacatatagtagtaactcaacaatatttgtcaaataaatgaatgaatgaagctgaagaagatgagaactacataattcccactgaagttgacaaccaggaagtcataggttggacagggcttgatggggacagaagcctggctccaataggtgtggacagtctgggaggtaagggagtagagtagggcaaggaagagaaaaggtggtgactggaagaagcagcagggttgagcaagcacatatcccaagggcacaagatacttaagtacactcttatgttgaggtgaaagagccaaggaagacagtaaggttgaaaatatgagagagagagaaagtgtaattgatggacccaaatcccagaagttgcaggaagaactataaattgctaagcaaataaaatagactgtttcttgctgtttatccttgtatcataggaagagtgaagtctctgcaaaggaaacagggtctgagttatgtcttgcctacccaaagctttactggctgtggaccttgcagaagctgtctaagctttctttgcctcagtttccttcctgcactatagggatgaaatttcctacctcgtatattgctgagagatttgatgagagaattcatttgtaaagtgtgtggtactcggagatcacgccacaaataccagctccccctccctttacattaccatctgctcagccaagaaggaaatttgacaagtacttccttgacaacatcagccaacaccagggcatcctttcctcaaaagtcactactgaatgaaattgacagcccagcctctctaacagactcccctgcagcagcaggaggaaggatgctctctccctgtcacagcacctcaagcccccacctgagtgctgaatccaacataccaatgccagcctggccaggagggtcttaagaggctggagaggacattgattcactaatgtgagcctctgttgccactgatcccaaaatgcttagggccaccaaggaccacatatcgaactgtatagtgagaagggtgggctacagcttagattctctggcttcacctgccagaccttccccttaactagctgagcaacctggggcacagcacctatctgccctgagcctcccaacaatcctacaaagcatattttatttgcccattttacccacagagaaatcgagactcaaaaatgtaaaataacatactcagggtcacacagtgtatatcaggaagccaaagacagaccaaaatggaattaatctgagtctaataaaaggttatttgtgaaaacatagagcataaggaaacaacagagatgtggaagtacctgggggtaggtaactacaggtgtctttagctgattcctagaacccaaggatagaaggggctgtgtggagagggccagctgtcagcagtcacggtctttagctgaatgacaccatgtgttgagggggaatggagaattaaatactccaacctcacttttccccctccctcccatctcctattggtgctctctatgacatgaacccaatcataagccaggggacaaagggagcccaccaatgcagtcgatacaggtcagcctcactggcacaggtagtagggaatggatctggagggcagatggaagatattcagtacacacagctaactcttaaatgtcagagtaagaacttgaatcagggctatcagacccctgccactacaatgccatttcctgtagatcctcagtaaatggtcattgaatggttgaaaggatggatggatggatgggtggatggatggatggatggatggatggatggatggatggatggatgggtaattcatgaagacttcattcatgtgcctttggttaatcttgtcacctgactagaaatatgaggcatgttagaaagtttatttctaagccataaatgggttctaagaataaaagccttcttcccagtttgtacatccctgtaggagttgcttatgtctctctggcctctggctcatttttcctgctattactgctgctgctgttgctgctggagctgcttctctctccaatatttgagccttgagtagggtcaagcttcctgcaaacaaagtgaagagaaggcagaggtcagaggaggctgttgcccttgctccccccgggactggagtgcaaggctaagttagccagcttctctgtgagttcaagggagctgcgggggtggaaagaggagggaagtgggaaggcaggatgttcactgtaattattttcattgatttgtctactcggaacccaagtgcttcaaagccgttgtgacatttaataaaaataattcaaggtaaaaatacctcttcctctctgctccctcctcccctttcatcagcatcacctcagtttgcaaaggtgggaacctaccaagggagaaaaggctggggacatggagtctgtaggtctggattggagactgtactattaccagctggctagtgactccaagcaagtttctgtccctctctaaatgttggctgcccctgctctaaaattaagagataagctaaatatggaaggtcctagtgcggaggcaacagtccaggattctaatgcaccattctggggcaaaagggcatgatttccccacaacttcctgcagatcttgttcctatctgttgagttcattttttatctttaccatttgacaaaggaaggacctcccatactaccatttcttgctagtttccaggtcataggaggttcatgcttccccttctctgttctttcttcattgtgaaataaataatattctgtccattatatagagaggataaacaaatgctagagtgacaattagtgttaccttgccttgtccactgactatacacctgaagctttaaatatatgaccttgaatcctgacaacaactcttccctatagaggcttgaggaaactgaggctcagagcagttaaatctgccacctagagaagcacagatagacagtagcaaagctggactctgactcaggtcactgtgactccagaggccacagctctcactgctggctctcactgcctcactataatgtatccaaggctgagcctggaaccgagcatcctgccttccaagtagaaaagccccaaaacacaacctgactcagcagcatgaaggaagcagaggagggagctagattctgaaaacctcctaactcaggaggtcctctgagagctgcaaagccatcccaggctgtcaggggaagatgtaatcagggtgacctcatatgtttcacggattcattaaagcccatgttctggggtaaatgattgctttcccccagtccttctgaaaagaaaatcgatcgccttcctgtagatttagaacaggacagttggcaattagaaaacacttcgccaggcaggcgctggggaaggaggtctcattccacttcccattcattctgtcagtgacacactggctgtgcctcctggcttgcagcaagctggggaagtcccagcctgggcctagggatgtggctgaggactcacgtgggcgctctgggctgtaagtcctatctctgctgctgaggccccattcgggcttttgctttcttttcccattccccacccccatccctgcccctgacagctaatggatttttctctgtacagagagatttactaaacaactgaactaggacacattaagtctgcgggtttggaggtttgttttagagcaactctcgccccaagaacaggccactgaaattaagatgcattcttctcagcaaatattgatttcaactagaagtaaatccgagaagcttgctgctcactggatctaagctctggcagctgcggtttggactaaggatgggtcacccaggtgctccccacctgaggcccaggagataagggcagtgaagaagattcgaggttaagctagagctgaaaactcaccacaaaaatataccaagaaaaactcactttgagccttatagttgcttgtgtatattgccagataaggaaaatgcccttattgtatatattggtgagcactcttggtctacacagcctcttgtgagatggaactctcacacatggccacagggaccaacacatggacttaatgctttccttccaaattggaccccagagtttccttcctttgggaagctttgcttaactaactccatcatttcactccatttcctccagtattttcagcagcgcagaaacacatgtccatgtgtatcttctcatcctcaaattttcctgcatttctttcatttctcccaaaaactttccagggcttgggaccatgtatatgtcttcagtatcgtctacagcactaaggtctacagcagagaaagcctggaacctttagaaatgaagtcagtccatctaagttcttaagccaattcaccaactttctaattgtgggatcttggccaaaacatctctctagatttcagttttcttattactaagaaccagattggactagataatctcaaagaattttctcagctactaaaaatagagtatagctctgctgtggttctcagttctagataacacccaccacccaccaaccttctcaatacttggcaaaggttcttgatggagcaacagtgctcttttgtaggcccctcaggcaagggagcaaagttcttgggatacatgacaatttagcataaattttaaaaggcaacaattttgatataggggcatttgggcacttcgttgaaggagatataaggatggcaaataagcacattgaaaatgcccacatccttagtcataggccacaatataccttctagaatggctaaaaaaattgttttaactgacaatacaaatgaggtgctggtgaagatgggactttcatacgttgctggcaggaaatcaaaatgtgcagctactctagaaaaccatttggcaatttattataaagttaagcgtatgcttatcacatgacccagtcatcctgcttttaggtatttgcccaagaaaaatgaaaatgtatgttcacaaaaaaaaaaccctgcacatgaatgtatatagaagctttgttcatcattgccaaaatctgaaacattgcaagtgcccttccatagggaactggataaacaaacaatagtgtctctaaactctagtatctccatataatggaaaactactcagcaataagaaggaacaaactactgatacctgcagccgtatcatagataaatctcaaatgcattttactaagtgaaagaaacctgacccaaaaggctttatactgtatgtttccacttatatgactttctggaaaaaggaacactatagggataagtacaatattagtgactgtcagggagatgcttaggggaacaggctacaagagaatttgggagactgatgacagtattctgtatcatgattgtggtggtggattcatgatattgtgcatttgtaaaaaacccacagaactgtacactacaaagagtaaatttttctggatgcaaacctaaaaataaattctaagaaaatgaaaacacaaagccaaaaaaagttaatgtggccatttttacacgttaaaatggctgcatcaaatggccctagtcaactgttctgctttagacccctcttccctagatttctgtgcatttcaagtctctgggatgtagacaggaaatttttcagaaggaacagagaagttattgaggatgcctcctctctccttcatcttctttcatctcccatttagtctgtggagcaggtgagtctgcagagatggagaatccttctgctggaatagcctgagcaggctctgagcagtaaggaagtggcatgcatggagctggctgttcatcatggaggtcaaggggaccttggatttccttctgctttgtccagcctaaattctagagcaaagaggcaaacatggagtcaggacagaattccagtgcatgtggatcctgctgaggaaggaatcccctataaaacacaacagcagagaaaaggaaaggaaagaggtagtgtggcacatagattctcagtattggtacccattttccagtttggtctgccaatcccatcttctcattttctttctatgtaatcttgagcaaattgctggttaaggtaagttgtagtttttcctgggtttcttcctctgtaaaactggaaaaataatcatacctattgagattattacgtgagttaatagccattcattgactcaacacgtatttattgagtatctattatgcacctatcactgtcttatgtgcttcacatacagataagagactagaaattgacaaaatgggggatgccagtttatacagaataatcagggaaggctcaccaaggaggtgagatttgagcagagacctgaaggaagtgagagaatgggctgggaagggcagaggtccacacagagggaacagcctaggcagactctgaggcaggagcatgcttgacagagctgaggaagagccaagaggccagtgtggctaaagagggaaatgccctttttttataggatagaaatgagaccagagaaatagtgagagatcggataatgaggggcctggagatgtccattgtctgtgcattgtctattattcagagtaagataagaaatcactgaaagcctttgaggagtggcatgatctgacttgtgttctaaaagaatctctctgggcagtttgtgaagaatagacagtagggcagcaagggcaaagtcagggagcccagttaggaagttattgcatgatccagaagagagatgatggtagcttgaacagatagaaacacatatataatacttagaacagaccctggcacatacaaagtgctcagtcaatgctatctataattattattgctggcatcatcaaattcatcatcatcatctagggtaggaggtcaggaaaagtcttaaccatcctgcgttcccagcaggaacaaatcccagaccctgctgaaccccacatgaggctgtgtgaacctggggacccacttcggaaactcacaggctctgggttaaggtttcacacactgcctcctccctcccacctcagttccctgagagcagtgacagggctttctgacacacacagtactttagtttgggggaagaagcagatggaagaagcctgggtgcagtagagctcctaagcaaggatgggaaacacaaaagaaaatagcctggcagggcgtggtggctcatgcctataatcccagcactttgggaagctgaggcgggtggattgcctgagctcaggagtttgagaccagcctgggcaacatagtgagaccctgtctctacaaaaaaaaaaaagaaatagccaggcacctgtagtcccagctactcgggaggctgaggtggaaggattgctcgagcccaggaggttgaggctgcagtgagttgtgaatgcaccactgcactccagcctgggagacagagcgagactctgtcaaaaaagaaagaaagaaggaaagaaagaaggaaagaaagaaagaaagaaagaaagaaagaaagaaagaaagaaagaaagaaagaaagaaagaaagaaagaaaagaaagagagagagagagagagaaaggaaaggaaaggaaaggaaaggaaaggaaaggaaaggaaaggaaaggaaaggaaaggaaaggaaaggaaaggaaaggaaaggaaaggaaaggaaaggaaagaaaggggcccaagctgagcacaagttgttgctgtctcatgtggtcatctcatttcatccaaaacgcattctgaagtagttacctccattcctcataaaagaaaagaggacctgagaaaagtgaactgcccaggtattagtaggagacccaggattctgacttgggagcagtggaacacccaagaacctctgttccccagtgggcagctcagcctccccaggtagattgtgtacattctctgacttagggctaagggctccaaacaggactgagaccaaaagtcacacttctgagtgcctccccacatctgaatctccagtacatagaaccaagcagttctgaaatcacactttcctttgctcctttgtttacaaagataagatgtcttcttcttcattatagaaaacagtggtttttcataaactgttatctctattggccattgttttttacaaacacaacaatgatatgctctcacctgatagaattttccaaattaatttcagagaaaaccacctatctgtgccaaggaactgaacctccaatattcctggaaaatatttggcctttcctttctaacaaagaagcctatcaaggctttttctatcatagttaacctataaaacatcatgtataactgtgtcaaaaaaaaaaactgagtatccttaggaaaaaggctaattctaaaaccaggagaagaaaaagtacaaaataaactagaaacaaggaaactaccaaacattatcaaagattattggatttctgtcaaaatgtcaagggaaccaaaataactaggctcccattggtcaaagatggtataatttaagcatcaataagaacaataactaccctgtattaaaatacatcaaaatgtttaaattagtgagtttattatgatacttgttttgaaaagtggcaaataaagggaaaaaagtcaaacatttatcctgcctttcctacacaaatgataccactgggtaaccaaatactttataagaagaaatttatatagaagtatcacagtcctaataaatgataaataaataataacaaataaatgataaatgaagaatgaataactgctgtatcattttgtagcaactaatggattagtagaactaggaaagacaactagacattgatacctccccatagaagaacacaagaccacctgtgtagtgaccttggcaaaaataaatcaaaccttaatctgatcaagcttccagatatatccagctccccacctataggaaatttagggatacaggaatccaccatagcattcagtaaaatcagattatgggaaaatctacaggaaaaaggacccagcaagaaggaaaaaaagattggaattggaagtgaaaactgtagattaaaggaaagttaagagacatgccaatcaaaacagataggtcttattggatcttgataatagcaagtacaaaacaaaaaagtctatgagacaatgaaggcaatgtcaacactgattaggtatttgatgacattaaggaattactgtgatttttttggtgggtgtttgcatcaattagctattgctgaataacaaaccatcccaaaatacagtgacttaaatatgcaaatattttgtctacctatgattctgccagacgatgaatatgggcagtgtcacctaggatggctcatatctatcccacatggtgtggctgggatcactcatatgcatggagcctcaacagaaacggctgttctctctctctctccctctctctctctctctctttctctctccctctttgtggtcttgtgttctctcattctcaaggatgctagcctgggcttcttcctgccttcatacggtggcagaagcattcatagtaagcatcaaaagagggaaggccccaatgggcaggtgctttctgagcctctgccttgtgctgtatttgttcttgtcccattgaccaaagagacacacattgtccagctcagagttattgtaggaggggacttcaccaacactaatggccatagctcatcaaaggtcattactatggtgacctaccacagggtgaccatggtagaatggttatggtttttaaaagagtttttatcccctagaaatacatattaaatatttccatataaaatgataagcctgaaaataacaggaggtgggaaggagagagtgggtgggtatagagaagaaataagattggccatgaatttactgaggctgattgatgaatacataggggatcattacattattgtctctattttatatgtgttcaaaatttttatggtaaaaagtttattttaaatggctagtcagtgtccaacactaggagaacccaagggggactacagccttctcccattgttgctgcttcaagatattgtgtcctacttcccaaggtaatgatgtgtgaggcaataacagggggcattttctaggcacgcggctcccttccctctctggagagtcatgtgaaacccagcaatttgtataagcaacacagtgggccaaaatccattccccttgcatacacaacacctatgattttatttattagtattcacttctttcccaggttattgtaagacttaggacatggacctattctggatgataaattacatctcattgcaattattaactgaaagaagaatgaaagaatgagaattcaggagccataaagggggtggggtgagaggcagtggcctccttaacagggagttaacagagaaggaggaagaagagaagaaataaatctcagccaactggtatcaatcaacacttattgcatgcataatgtatactgaacacttatttgcagagaaaaagaaaaaaatgtaaagtgcattagacactgttcatgtctttccatgcttatagtcagttattccttcaaaatatttattgaataactactgtatgtcaggccctgttagatgctagatgagaataacaagaggatttaagacacttttccaatctgtattaatgagggtctattccagttgtaataataaattacaatttaaatggtttaagcagaaaagataacttactggcttgtgtagctggaaagtctggaggtagcttcaggcacatctggatccaggtgctccaacaatgttgtcaagagtctgtctcttttcatctcttaatcagcttccctctgtgcgggcatcattcccagacagactttcctaccggcaacaacaggcttacatcctaccgcattggcagcaagtgttccaggactgagtctccctggaacagcttggcccagtgcccattctcagtcagggagaaggagcattctgatgggccaggtctagattgtaggcctggctctgtgactgtggaagaggtcagacccattcaccaacacagactgagagaggaaaagggcagctcctccaaagaataatcacattgttgccactagaaggaggagggacagatatggacctggcaaagtaaccaaagtcctctcagtacttgcagtcattcattcattcactcagtaagtccttcttttgtgcatgtcatgtgccaggttgtattgtaggtgctggggatacagtagtgaacaagacagacaaagttactgagccttgtattttagaggtagagacagaaaacaaatgtgtcaacaatccatttttgtgtaaattacagacagggtgttgtaggagagaataacagagataatcttcttgaaatgggtggtcagggagggctcactgaggcgaggatattaaagctgggaggcggagggtgagaaggagccttaagcatcccaagtgtggattgggaactgagggtggggagatgaatacggcatcctccctgcccttgaggagctcatggctgaatgggagagaagatgagtagatagaaaccctgccatacagtacagcaagtgctatctataatatagacaggatccctccctggggacatcaaaaaggaagtaactaaatcagatgataaggcttggtggtggcggcggagagttagaaggctttacagagacatttgagctgaaccttaaaggataagcagatagaagttagaaacaagggaaaaggaattacagacaagggggaccatcatgaggcaaatatcaggcatagctggggaggagtgatgctcagtctggtgggtacactgaggccacagccgtggggaaggctgggctcatctgtgaaggtggttaataatgtcttgactgccccacccacatggaacaagcttgagggaaacaggtcagatcaaggcttgagttcactgtgtagccaaacaggaaagaaggactcagctccctgggagcaccctaaagggcttcaggcaggagggggcttttgagctgtgctttgaataaattcatctccctcttctttatcccctaacaattaacatgtcttcattaagccagacagaggactaggagaagtacaaagcaggaggcatgatctctgacctcggtttgctcttgtggagtcaactcacagaccacaagttagattgaccttgactctacactggaaggagccttagatacagtctagtggctctgagattcagagagggcaagtgagttgcacaaagtcacacagaaaactaagactagaatcctaattcttctccctgcttttgagcaaatgagtgctttgcacctggtaccttccacccatcagtcctgtttctgccccctggggcctctggagccagtccaagttctttctaatatgtcaaaacagtccagaaactccccagccttttcttcctcaagtcaagttccttcagctttgctccagatggctcaaagttcagactcttcagcacccacctccaatttgtcgaagtccatctccaagtgtggtgcctaggactggataccagtgtcccacagagtgggttatcacttctttactctgagcatcgtaccgtctctgcgttcatcaatcccagggcattgttcagagcagcaggagttgaattgagcttccccagaatcattgcatgagctcccacctgcagcctccaaacctgtgcactcttagcttgaaattaatttagcagcagccaaaggttccactggggtgcactctagagagtatgttcctcaactatgtggggattagggcagggagcagatttatgagtaggaagacggagggaagctgtgagggcaaaaacacgagcctgggtctgtcccaagtgaaactttcctcccactcctcagccttgaccactggacccattcccaccctttcccagctgaaatgcagcaaataagctggctgctgcaaaaagtgcatggggtgggaagagcactgtacaaggagtcaggaggcctcagctcaggcctgctttgccaccagagcactgagagaccttaggccagtcagtctgcctctctgagcctcacttccgccatctctaagtagaatgtctctatgttttacatgcatatctttcttcatgatggcagcaatcactgattcctgggggctacccgaagcttcctaaaggccattggttagcatggatccactaccaggaggtgagggctactgttcttgtgtataaatggttggggacagtccccctgtttgggactgtgccctccaagacagagagacacccaaggacccttccagaggcaggaggaaggagtggtcaagactaacttgccagataaagtgcagaacgcccagttaatctgaattttggataaacaacaactaattttagtgtaagtgtatcccaagacttgcatgggatatacttatacaaaaatatatttgttttttatttgaaattcaaattaagtgtctgtcctgtatttttatttgcttaatctaagccagacccaggtgaagttggaagtgtttgtggggagacaccaagtaccaaacacctagttgcaccccctcatcccccaactttttgcttcctgcctctgtgtggtcctcactgccatgaagctgagcatacagaaggagaagcaggaagccccaaagcaatggcaggagtgggaagatgtgagaaaatgaaggagacggagaggaacactgcaccagagagagacggtgcctttctggaggtcacctgtccctgcagaagtgggacagtcagagtgggtagaggtgccacagagcaccaagttaaggcagcgggcacctgtgttcagaactgtagcatcataaagcctcttagagggaaaatatctccctgcaaggtggcctggaccccagcagagagagggccaagcaggagccgattactgctgacaagctgggtttttttttaagcctctctcattcttactctcttaaagatcctttcctgccaccagttgatgtagtctccgaggggatgctctgaatccccaaacacccataataatcgccttgtttttatttcatctggggataagcactgtggctgagaggacagcaggctccaatttgagccctggacctagagagacggtgccagggcagacatgtctcctcattccccgagacccagagatctcattccttatcccctttcgggatcccagcaccaccctccacacacaccctccctggcccctctcctaccgctatacctgaattaactaagtactcagtgacccaggcctccaacaagcagccggtcaagcctggagagtgttttaattctgtaccactctggtgctgtctccaaaaacaagcactgttggtttcccaggggccttccctgcacagaattttgcatgactattattcacaactggtagggacctgaactgtcagcctgcaccccaggcagggtcccttaatgcgtggcccagcctgcagggagctctcagttcctgggaagtacgacaagggtttgggtccatccaactcctgcagccaggaaagggcatcactggggaaaggagaggaatgggaagaacaaggagacaaggggacatcagtctcagtgtgcctggagtgggagacaatgggggtcaaggattttcacagcagaaattaaccagttcttcccctgttgcaataaaattttccattggtaccttccaccctgatatcagttctgcccgctgaggcctctggaggaagtctaagttacttttaatacgtcaaaacagtgcagaaactctccagtcttttcgtctctatgtccagctccttcaactttgttccagatggctcaaagttcagactctccatcacccacctctagtgtgtcaaaggccatctcaaagtgcagtgcctaggactgaaccctggtgtcctgcacagagtgggttatcacctcctttgctctgagcaccacatctctacaaatgctgccaaagatgttgctaatttctatccaaaggctagactgagccccagccactgacctagtcacagtagaaggaggaaaactcccaagaagtcaaatactcaagaaaccctaaagcaggaagaaacaccccaaaactctaaagttggctttggcaaatacagccaaattccactttttctgttacccagactgcccaggctcacccccaccttttccagccttcctttctctttcagcttctctttgccacctcttctcatccgacatcaaataactgtatgaccttgggcaagtcactttgcctctcggaagctcttgttcttcatctgaaatgacagtaataatccctgggctgcttacgtcgcaggcctgcatgagactcgattgagataattaatggatgagaaagcactttgaaaattagtcaacactgcgcaaatgaaaggcactctttattcctttattcatttatttactaatcttgcacatgaccctgcactgagaattccacaaaaggagagaactaagcagagctcatgactgcccagagcttaaattctggaatgtcagaggcagaggaaccttagagagcagcaagcataaccccttcattgtacaggcggggaaactgaggcccaaattattgtaatagtcaacgtatgttaagctatttctaagtactttggggtcttaacttctttaagcctctaaaatcctatggagcaggtactattattcccctgtttaaaagatgaggaaactaaggttcagagaagtgaagtaacttgtcccagatcatgcagctaacaggaagcaaaaacagaattcaagcctggaaaggcttattccagaacacatatcttgactactgtgcaaggtcacccagtgtgaaaggagcagaggctgccagccagggctccttccattccaggctgtccccacattgagaaacagactggccacaaatagaagtagggcccgaaagcagctcaaagtggccccatcccatgagacctaccatcactttgggtacccacccatgtatgccttatgccctgggtcagaaggaggaatcttggaggaaagtcacgtctggaaggaggggtattcagcacagcaagaaaatagcagaatactagaaacagggaaaagaaagagagtagaaaagaggcttcccaaagacagggaataagaaggggcatgtgaggtgtcagaggtgactgggacaggcatgaagctgctctggtcagcacttggacatccactgaatacatcctcatcagggcctcctactgtgctaggcccagggcaggggacataagacacaagcagtttcacaactcctgaatacctgccaggtgccagccccagggctcagcaccaggcacacagactcaagtcctgagcccagggtttcacattctaggaggtatcccaagacaaactattaaaaatcctcaagattttaaagctgtagattcaaagtcaagagcccgggtttctggcctaagcccttgtttgctgtgtggttttagggtaagtcacttccttaaccttcattggctgccatcttcccatctgtaaaatggggacagcaaatctgacctatctcaccactgggtttccctaaagaggacatgagcttctggctctgaaagaatttgatttaggaagtgccatcatttgtgaggatgctgattgaggtggagggtggcaatgaggtgactggaagagagtgaggaatgggaaaagtggtcctatgtctgagctgacttgtgggacaagaatggaggaaataggtagaacctgagtctcctgcttttgagcccacggctccttccactgtacttgatgccaatactccctacaatgaatccattgctaaaaatgctagagttaggttacattactagatgtagagtgcccagacccaggaagaaggcagatagcctggtctctctaatcaggcaggatctatggtgggggtccatcctgagccccatgctttgggcagagtagtgacacatggaagcacatccacagaggcggctcagtgtggcacaggaactggtaaccaagccctcaagatctagataagggcattgcaggtgtttccactggagaagaggtgactcagggctcatgaacctgcctgcccatccagagctcctcccatggtccccacctggctccttgcagtccaagcccccagaggcctgcccacttactcctctgcttcactctcacagagctagataattcaggtatgaggccagaatggagttgtagccagggcccttaagaaaatgtcccaaggatgtatctcagccccaacttcacctgcaaggcaggacctacaggctcaatgaactctcttgttcccagataatagctctccattacctaccagaggagagccaaggcccctttccaggtaaccaatccacttcctaaattcacccccatcacaacactttccctcagcctcactgtctcatgtttccatgctcaagctgtccctttttcccaaaggcgcttctcccccatcttgttctgttgaaaacctcccatcctccaaagtcctctggcatcagaaagggtggaatctgaacccaagccctgtgacttattaacgccatgacctggggttgcccatttaactgccctggcttcagtgtctgcatctgttaaatggggatggatgaagattcaaggtgcggtttcaaatagcccttcttaaataccaacatgcaagcaatcacccttggatatcgttgtccagcagacattgattcagtaggtctggagtagggcccaaatgtgtgcatttctaaccaactcccaggtgatgctgctggtgctggcacacctggaggaatgcgcatttcaaacacctcatctaatgactcgcaagtagcgctagctccctggagttgcaggaatggaggggtgcagccaggtgaatacggggcccaggatatccctggggactctgaggctgctggaggcctctcctcccttccacccagcctagcagtttttaagtgtgctagtaccttactaggggatccaatcccacaaccccagccttttaatagagataagtttaccaagaacctcaaaggtgacctcaaagggacctccctcccaataaatgtgaactttgagaacaaaggtggcaggacagggggtcccagaaggataatctgaataaaggtggagtggggtagaagggtgggctccccaactctgccttggcactagggaaagtgagttgaggacatcacagacctgatggtcagctctgagaacaggcccttaggcctctgctcactcttagagactaggcacccccaaacttgggctgagcctgctacccatttgcatatcctgccagcagccgtggggcctctggatcccagatggatcctggaatcaaatcctgcctctgagagtcagccaccaacccccagtgtgacctgggcccaggcaccacccctctgggctcccaggctccttgctgtaacatttgaggtggattccatggtttctgagcttcttctctggggctgtaatcattcgaatggaggctagaaggaggagggcatgcagggataaagtgacagcgtgggggcatggagaaccaaaacacccaaagagaaaaattctacttgtaaactattaaatatagagttactttgtcaggaaacagggcacacagcaccataaaaattaaagtaatttactatgaaactccatcctgttttattttgtgttattcccaagccaaaactcccaagctgacctaagtcaagaatatcaacagcacaggcagcagcagaggaagaaaagagagcgcgttctcaccttagcaccatcttggggcgactcaaccccacctgtctccatggaaaccaggcagaacctggtggtccaggacttggccagagaaccagggccttagcgccctctgttgggtgaagctggacacagcttagcccaggagacagcccagagagatgggggcccccatccaggccaggacagggtggggttcagcatctctgaaggttctaagctgagtcagccgcccatctcatgccctgcaagcacagcgaggctggtctcaggtgccactggtggagcagaaaaaactaaggagtcccagggttgcgatactgccctacctctcaccaactgggaaatgcggtaagttgctgaaactttctggaccttggttttgtaaatttcatctgtaaaatagggatagttccactcaattcacagagctgttgggaggaataaataagagcctctatgtcaggtatctgaccctcctgggagtttagcacccttaagaagtccaggcccttgaaacggacccagactctctgggaggaggctgcctgccctgtgcactctgcacccacctccccccacactcatgcagtggctccttgtctgctttgcctggagcatgaagccccaacagcaatgacagtggtgatagcagtaaacattacccaattcttcctaggtacacctctcatttaggtcgcacaacggtcctgatccatgtgcatccagtgatgaaagagagaggttgagaccctcccaggtcatacagcagcaagccaggggctgggcctgcatgtgagcctagatctttctgctcccaaagcttgtgtacttaactactaccccagacttcctctcctgtcatggaaagaatcctgcccagaaaaccagggctccaaatcctaatctcagcattgccactgggaaaccacgtgacttgggcaaataactcacccctggcctcggtttccctgtccattaccaaaggggtgaagaagatgatctctaggggctcttctggctctgatgttgtgattccagtgagccgatggggtgacaaggagtaaaggcgaggtttggttctccccaaaaaaagtgatgactatggcagagcagtgacagccaagccatagaaggcctccccagtggcctaatgacctctgctaatgacaggcttacacattgcccctgctgtctgtatctgtgttggtcatgcccctgctgtctgtatctgtattggtcactgctgcctgacagtggcaagtccccgcataaccgcagggaacaggaatctctgatccggctttggatagaaaactctcacctgcatgttctcgctatcttactttcccacttgctacagctcccctgggctcctgtgatcaaagtgtctttccataagtctcccagggctggcacagtctggtaggaggggaggagacagtgtgacagactctgactgagcagagggaaatcacagggaggccgccaagacattcctgcccgcttaggccagaagacatcacctcctcgtccccctggcctgaggaaggctggaggtagtgcggcaggaggcaacaatgagaggtagggaaaggggtgcagcgttcctggtctttaaaaatgaaggccaccactcccctcctgccagcagatgttgaacagtgtggtcctgaagaagcatcccagctggcctggttgtgagatgcagaaagaggataactctccccagcccccgctgttaccaaacccctctgagccctagttttcattaatcaaatgagaatataagtacccacctaccttctagactcactgtgacaatgataaaacacacataaagaacttaacggtgtctggtacaaaaggctctacaaatagctgctcccatcctttcttccccatcctttctgtccccacatggaggttcaagcccctaatctctaagaggcagtaacaatgtgtaggccctacctcttagggttgacagaaaaattaactagcgacgcatgctcatggcactcaagcaaagcccctccttcccctcccgagcctcagtttctgtgtctgtaaacgagagccaacagcgctcacttctcaaagctgccgaggggactgacagaggtgaacaggcagcatgtggcgcatgcctggcacttggaaggggccatcagtacatgtgagtccccccaccccagccccgcctgcttgctcagggcaggaccttgtctgttcattgccagataccatactcagaacaagacctgacacgtatctatttgttgaatgaataaatgcatggagacccattgcacagatgggaaaatctaggcacaagttctggggttccacatttggtccatcataggatttgctgttgggagtggacagcaccacaagagcagctgatgcttggtaatgtgcagccacttacaccactgattggcagccagctgtcctctcaggagctcagcaggagggagctaggtagtgccgtccttcagctgccaagggttattattgcacagggaccaagagggtcagggcctttctttccaggctaagtggttgtgggccggatgggcaggagggtagagggccaggagagagggccgtagatctcctgcctcctgcatggtggctgctacagtcaccgctcagattcatcggaagggcccacttccggcagaaaagcaggccggtatatctccatcagagactcctgctcaagggcagcaccataaatcctggggtgggagtgagcaagcgagcaggccaaccactccttggtgagcatctttcctcctggggcctgggtgctctgcacgaggtgggcacggaagcccgtgcaggaagcataatctgcagttctgcatctgatccatcaataacaccaggagaagagccttcctcctgctccaagcaggcggagacaactgcctgtttctcacctccccctgaagtcaggagtttaacgctcccccaggaccaggatctctctcacttcctgcgatgcttctgcagctgctcgcctgtgttcaccagctcagccgacccttcccagcccaggctgctgaggagagaaaggagtactctggcaccacacaagagggaggggtgggtgggaaaggaaggatgggagccaaagcaaggaagaagaggtgggcggggctggaggcctagagccacagactcctcagccagcaagctacttgtgcctagatgttcccatctgtacaatgggtctccatgcatgcatttattcattccacaaatatttatgggtcagaatcttgttctgaatgttatatctagcaatgaatagcaagatccttccctgagcaagcttgcattccagtgaaggagaccagcagtgtcaaggtaaacaggtagagaaactagattatttctgataataactatgcagaaaattggaggagtgttggaagagagggtggctggggtgaggatactacataagctaggagttcagggaaaatctgaataagtggcattcgagctatggtctcagtgataaagaatgaccaagcaaggagatgaagggagtgtgttcctggcagagagaatagcaatactaagtcttgaagcagaaaggagcttagcttgttcaggcagaatggaaaccagtgtcactgaaatgtgggaggtgggtgtctaggaaatggggttagtgaggaaggcagaggcacataatgcagggccttgtagaccataggctgcaaaagggctgtggatttcacttacaatggaaacacattggagggttttgagccagggacatgctctgatttaaatctgatgcagcctcctggagctgctttgtagagagtaatttgaagagggcaggagtggaagccctaggtaaggaatgaggccccataatagttataaatatttgacctaaatgagcttagaaaggaggcaggtaaaatgcagcattaaaagggcagattcaacaaagataagccaaagagccaatgccatgccaaccctggtaggccaaccttctcgtgtttagttgacaatccagcaaacatttatctagcatcttctgtatgccaggtgacggggaatcagacataaggaagatgtcctcaaggaggtctcagactagtgggggagacaggcaaggagacaaatgacttcaggcagaggctgcaagtggcccccttaaccagagagatggcggggaggcttcccagaggaggttacctctagcattttcaggaagagaggaggttaagacaaatatgacatgtagtagggaagtctcagacacagatcccaggccaggttgaatggccaaaacctggactccagcccatgtggagaggaactgaggcccccagcaggaaaccagcatcaacatccagacagattccagcccctggtccttgaatggtccatctgagaccccagatatcatagggtagagaaaagtcctccccactgtgccttgacccaactcctgacccatagactctgggagcataatgaatggttgttttacaccactctgtgttggggtaatttgtgacacaggcagagtaactagcacagctccccaatgccagctcttattattaagtccaagctcttcaaacttactgggccctccatgacctgggctcctctctcctctcctctcctctcctctcctctcctctcctctcctctcctctcctcccacagcctttgcttctgcagatgaaatgccttaaattctggatcacagcaggctccacacttaaggtgggctctccctgtttcccagaacactccttactcctcaacggcgctggctaactatgccaccaggtctcaccgaagaccccatcttcctcaggcaatgagtgcccttctcatatgcgctcaggataccctctgaccccaaacacagtagttatcactcacgctgagaccattgcctgtcctcgtgtccatctgcctcccttgaccagaacctctgtaagggcaaccacgttgttgtccctttcattgtttagtcccccaacacaatgtctggcacaaatgtgttgaacaaatgcacagttgaatatatgagtgaattcttcctcaacaggagcaacgaagggcacgccaggcatttcttgagccccttctatgtgtggagcactgctgggtgcacagtaagtgctgtcaatgaggaaagaagccagctctagggcaatcggaaggacagctctcatccattggggcttcccagaggaggtggcattggagctgggcctgggactgctgggcctgtccaacgatggacaggattttgacaggcaggcagggagggaaacagcacagtcaagggaaacaaaatgaactgcctggataaagtctaaagcagcacaacccaacatgccaatccacagatcacactttgagtagcaccggtctcagtagagagaccaggacccagaaatggccaaggcatcttgatagaggaaaagttgaccccacaagggagaagtcaacctgtgtgccggtatccagtccctgaggaaatgcagaagaaaggtgtttggagctggggatggggagcatattagggcagagtcagagtctccaaggcagaatagccaggcagagatgccctactcagaggccacaggccccagataagacaaagcataaagctgccctctgtgtgcactgtgcgtaagcaaccagttcctcagtgattcccgtcattcgcaggctggtgcgatgtctcctaacctttttgcaacaatagaccacttcgaagactctgttagcgctgtggaccctccctctgaaatatttccacgtatccgtgcactgacatgttgacctacaatttcagaagttcatagactttcaccgtcccccctacccctgcagttaagaaccctggtctaatgtaccgagaagctccttggacaatgtgtgggagcccctaattccaggatcactagagtcaagcagggaaggcacacctcaagaaagatctgaaggcatgtggggctggaaaagcaggaaggggagctgattcaaactctgcctaaaggcagggcagaggctgggagaggcagccagccaggaagtgaggtgggagggaggaattaggcatctgtgggctggggggttaaagccatggagaggggatgcggctggtgaggctgaggcaaccccaggggagggtggctgatatttggttcccaggcaaggggagatctagggagagatccgggcaccaggtgtctcagccttagcttccccatttgtgaaatgggaaaatactcctcttacctgcttcctccccagtggattccagtgaggagggcttcagtaaagcccatccggcaccctgggtccctcagagaggagccctggattaatgtgaagattatgctcattataaggaatctgctgtaatgcccaggaagcaggaggcatgtgaagcatccagccttccagggagagagataacagccagaccgataatgccggcagaggaggatggagagcatccagagggtttttatggagataggagggaagaaagcagccgactatgcagagggggcaggaagctgaggggaggaagtaagacaaggagatagttggagtattccacatctaacactggttcctgcccctctgaggaccttggaagttggggagcagcccccctagccccacaccccaactctgcctcttgcttaccccatggcccccacccagccccttagcctctatgagtctcaaagaaagggggttacttggtggtgctcaggacacatgggcaccccctattccaagaacatgttgctccctgcctcctgcctgcagggaacacagacctaaggccttcgtgccactctgccaggtctacagatgaagaaactgaggcacagagacatcaaagagagtgtccaacttgagagctcaggtctcactgtgttattctggggtctggggtaggtggctgaggctggaagagagaaactggaacatcctggcctaaggggaggacccttcttacaggaagagctggcctggggctcatggagtaggcagccctctggctaggcctggaaggaggagtggggctggaggtggaagcagcaagtgtgggggtcagggacattgaaggcagcaggcagcagagcctgagctaggctgagaggagacacgaggttattaatcatttataacagctgtaattaattgagaacctactatgcgccagacacttgacttacagaaggtgtcccactgaatccacacaacggctgtatgagaaggactcattagctcttttgacaggcagtcagagaggttaagtgacttgcctctagtcacccagccaggaagtggaagccaggatttgaacaaggtgtgtctactgcttttctcactgtctacactgcctctctgagcatctatttatgttcccacccacatctagggtggttgggatttaggtactcagtaagtggcaaccacaggagggtccaattcccactgtggggaggagagcaggtgtcagtgcctctgaggccttaataaacaagcccatgtgtctcaggaaggcccctgcaagcaggagctggagagcagggcattcccctgctttggccccggaagactgcctgttttgtccctcagtcagtcatcagacatcattgggtctctggcctctccatgccccagaatgcccggcagcattggctttgcttcacatgttaattttttgatctgataaaagatatttgtctcccagccgcttctcttttctactagagaggggcatttcctgaattccgaccctcagggagacaaacaccgttaaaaaatcatcagccttcaaacaaggctcagagacacagggctggagcctgtcgcctggctctgagctgcgtgttagattcctgagcatagcccccagctccacgtggggtggctgacattccttgggtttctctccaccctccctgctgcccacagccgggaggtccctgagctctgcctgttctcatcccggtccactgccccttctggggaccttggcatctcctggctgtacactggccatcctgcccgcatgactggcccccacaccagcttcctgtacttatacattggttacttggttcattcaactcctactgcgtgccaggacctactatgtgctagcaccactgctaatccctgcctactggagtgaaaaacatagttcctgctttctaggagcttacagggtagtggaggcgggatggtgggtttcgggggggttgggagggggaccatgagactccacgaacttgggaatgaaccctttcagggaggggtggtgaagcttagggtgaggtaggtccggtgctgtaggaggaaaagggcggcgcagctgctgccacagaacgggtcccagcacaggggaggcatgagttcagccttaaaggacgaataggagtcagccacctgggctttgcccctccctgttttccatctgtcaaaattctaactaaaaggcccaacttaaaaaccctttccccaccacacatgcttccactcttatgagtactcagtaaatgttgcaggcaaggtccttccctaggcccctgctgactgtgcagggtccgcttagggcctcccttccccgggtggtaagaacagcgccccctaaagttctgcagtgcacaacctgcacagctacacaggatggcccttaggctatcggtgattttcttcctcagcatcagccctgcctgctttcacacagcagaatatcaaatccgtcctcaccttgctcgactctgctgcccatccaccactctgtccatttccacctgcctcacaggcccctctccttccttgaaaccttacctctgctttcaatggcttctgctgacgtggcaaaccacgtttaaagtgaccacggccatagtcctgtcccatctgtgttctcagaatcctcctctgagcatcgttttaagaaatatatcgattcatggaattagggagtgtcagcatgtgtgcatggactacaaatggaaaagggaagtcacgtcattgaccatatactgtgtgcaagccaccgtgctagctgcttcacatatctagatagaggctattttaagtgaaaagaagaaaattatctcagccttttaggatggaatggaagggagccaaagctggaggcatttgctgaatgcacacattgaatacatatatgacaaagcgcttcaagttccattttctcccttcctgaaactccttctgtacatataatgccctttggtctatcatgatagtgtagatgagtgtgaactgaaacagacaaatgagggcttgagactgtcttcctaagagtgggaattgagcccatcatttcagctctctaggcctcaacttcttcatcgatgctgtaaaggtaacactagaagcacctcgcaggctcaccaggatttactgggcaaccccacaccaagtgtttaacatgctgccggtcacatattaagcaatacacatgagctactcttactgttgccgtcattgttgagatgccagcttctttccttgttggagtctccatgcctgctcagtgtacatttgagtgatgaggatgaggatggcaggagctgcaccagccccattcccatgcccatctccatgggtccaagcaatccagcaagtgggagtcagggggcagccctgagagaggtatcctggaaagcactagttggggcactggttctgccaagtccacttttctgggagccactgtcaccacacgagggtgcgagaaataaaccaggagtatgcatacagctccccaaagggtgctgagaggccgagaaggttgatgttttccaagtgatttgagattgtcaagtaaaatcccctatgtaaatatgattccctaatggattcatggcagcaagggagatgtcgttcaactgactatttaacaaagctgtttaaagagagagagatggtggagatcatgttttatgtattagatgtgaaaaaattctctttaaaatttgtctcagtcatctgaacgctggagttccgataaagacccaagttttatgatagatgttttacaaggatgcacaccttctctggccttctctggcatcaccccaccctccacttccttccctgatcaaatcctcaagagatacatttaatcctcccccattcccaaaatgttctaaggcaaatatgcaatatcatttttcaagtgtgcattaataatgcaagctttacaccaagttttcaaactggattggcatcctgggccgatgtagaaatgtctgggtcaaatatactttaaagaaaaatttctttaattagtttcttttgaacgttacacaaaggccttgcctgatagcgaggcaatttattgccatcttgacattgcctccgtgtttatcagttaaatgattctattgcattgaaaataggacatcttagctctgaaggaccttgcagacttgtgtacttactatccttctccttgtctgcttttgagaaggctctgggcattgttctctctggtttgaaggtgaaagggtggtcagcctggcctggagatcaaagtcatttggccaacattatagaacaaggagaagccagagttagatgaataactcaaatctccctgtatgatcctggcaaattgctctatcaccccagactgagttttctcatctctgaaacgggtgtaatgatgatatctccttgataaagttgttgtgaggattaaataagatcatgaatgtcaagtgcctatcacatagtaaatgctcaataaactttagcaattatgatgataaaaatcattattagtctcctctcaagatgtttcctctctccattcctgaggtcctggtattaaaatcctctccaatgccttccttataatgttcaggaaacctgactagtctcttagaggaatagacaaggttctaagtgcaggtcatctagccccgcactagtcaaccattaatgtgcacataaatctgaatatcttgatacatgagaattctgattcagtaggtatgggtagggcctgggactctgcatttctaatagcctcccaggagatactaatactgctgggccatggcccacactctgagtgctaggggctagcccacagggtaaacatttgttcttgggaaatgtacacagcttgtgggagggagggttgtaggggaaaaaggggagatattggtcttttctctccctccctccctcccttcttctttccttccttccttccttccttccttccttcctggttactttgctttcacaggctgagcctccactgtccaaagaatggagggctatagaatgacccaagccaggacaattcagttgttcaatccagccctgcttccttcctctttcaacaagcaggaattgcatagctattatgtgccagacaccacacacagaaagaaggccaaagaaacaaaattccttcctataaccaaaaaccagtgagacagcccttgatggctacaggactctgggtgagatctttacactgacatattttagaaacttgggaccaataaggagagcaaagccactacagaggtcagagtagatattgtttccatagccactgatcaagaggtcaggggattgcaggctgtttccaggaatcgtgaggggccaggggaggggaggagtcatagcaacattgacccagacagcactgtctgggaggaaaagggtacagccgggataggcaggccacgggcccaatcccagctctccaggtcctccctgggagactgaagctccctaacctgttagtaagagcacctccatcccagagatgcaggaaggatgagtgtgatcctgtgtgcacagtgcagtgccaggtacatccctctctccatgtctgggagctcccttctccagccatccgagggagctggggatttggtctgcaagtgacagattgagcagcattgaattataaggcgttggttcttttgtttgtttatttcccatcgcaagcctgtctactcaataattcaattcaacaagccctacttaagctctaccttattctaagggctgtacagtgcactggaggggatagaaaaataaagataaataagactccattcctgctctcaaggaacttcctgtcctgccaatgaggaagctagacacccttacacagccctactccccagagaggggcccagggtagcagtcagcaacataaacaactatcacaagtgcatggaatcagctgtgggtattattgcaaagacggaaatctgattctatttgctctgtaacagggttaaaatttcccaaaattttattaaagaagaaaacaaaaatacagattcttggtggcatctgatgaaaaggtcaagacatcaaagatacctgagcatgccctctgaaatacatccactattgttcttttaatcctcactccatctatacacacacataaatctgatgtcaggtaaattgagatcaatgctataattaagatgcccaaatagcccagacttttgctggccatcacaatttcccatattccattctgttgtctccctaggtacatgagtgcttgccgggtcagttgtcctgatgtggggctgggaaaatgtggtcgccataaggataatggacagttaaccatgctggctgccttgttttggaacacctagcagagtgcagcataataaactgctttgttgtctctctccagctctaggacaggttctccagaaaggcagggactgtgtgtcttatcagtggaaattctatgtgtccagggactggtatgtagattgcttttcaaatgaaaaaaaaaacaactaaataacagaagacccattgcatcttgcattggtgaacagctgaataaaaggagaagggtagaaaagaaggaaaggaaggaggaaggaagaaagagaatggaagaggaatagatcccttccaccttggaggaattgctcctttgaggaggtgggagttgtatccgtttattatgatgctaatgaagtctgacttattctggcaggttcccaaacctctgcctttctcctctgccccgtgctccctccagttaaagattaacgtgatcctgatagtgatgctgttttgtgtgagtccagggcagtcagcactgctgaaaagaaaagagcatctagaaacacttggggctctcaacccacactcaaggcctagggtgcttagagattcatgtggcaagggggactagccccagagctagggtccctgttgcaaacccagcattgcaccctccaagactctaagcaagtcacaactcgctcctcctttctgagtcttagttttcccatctgtaaaatgagcatttgagatgtgatcagtgaggttcaacctctgctccctgcagttgtaaggaatctaccaaagtggatggaaagagggaagtcgaagctgggagaggcctgcccccacccaccactgtcagaacaactcagcttgtatctatatatagactgggcctctgcataaagttttcctttgaagaaagggttttgaggttaaaaataacttgagaattactggattggatgtcctctgaggtttctttcagctttgacattctacttccttccttgaatctatatcttgagcgcccactgcaagtcaggcaccatgctgactgataggaaaggactggcgatcaaacccccatcccacccacaggacctcacggtcccaaggtggggacgatgcagccattcagagtgccacacttaaaagcagcagctggcaagtacttagtggcaggagccagctcctgagggatcacactcaaccccaggcaagatggttcccaagccatttctaggaaataattcacaggagctactcctccaaagtgagtttagacacatgaagaggacaagcttagggattcaaatgtggaaatgccctgactgctacctcttatccccaggatttcgcacaggcataaggacacaaaggcatcgggtgctcacccgcataccagcgctttgcctgagtattaaatcttcatgctcttacaatctgggcattcttatctcccttgtacagatgagaaaactgaggttcaaaaccacaaagtgacttgctctccaccctgctttccaccgtctagagtcaagactcgccacagcctttactaaagatcatctggtctctacttggccctgttatagggtataaagagaagagttgtttgtccatggtggggccagagtgacactgaagggccagcatccccctagggccagcggcagaaattggaatgggaatctttgagaagaggtggagctgagatccttgtccgctgctctcctgccagcccctccttcctacacaaacttggaagcatggagtcttgcatccagacccgaggcatttcttacagtacgcggatgggtgaaagggtgcccgccactccacagatcactagggctaattggactgccttggctggctggatgagatcaccctcatttgtccgtggcccatgcacaatcccccaaagaggctgattttccaaggaacatctgatccttcttatgcctagaaatggttaaacattaggactcaaactgacctaagttccaattctggctcctctgtttattagcaacctgaccttgagtgaatcatttagccctctctgaatcttggcttcttctctgtaaaacagaaacagtaatacattacaggactattcctccttttttttttttttttttttccagaattagtgtgtgatttctaatttaatttttgttttcttctgtgttatacatgcttatagtttaaaggtcaaatcattattcaagacttttgaaaaagagctgccatctctcacttctctaagaaactttcaattttagcagccttattgatatataatccacaaacgacacaattcacccacttaatatgtatggatcagtggcttttgacacattcacagagttgtgcattcttcaccaccaatgattttaaatattttcattatccccctaaaaagtctcacctccctttagccatcaattcccagcttccccatcccctccctaatcccagcccctgtcaactactaatctacttcctgtctctatagatttgccttctctggactttcctgtaaagggtaccatataatatgtgatcttttttgtgactggcttctttcacttagaataaggttttcaaggttcactcatgttgtaacaagtagaggtacttcatttgtttttttgccattttgtagatagacagtaccacattttattcatccactcatcagtcaatggctatttgggttgtttccaccttttggctatcacgaataacattgtatgaacatttgtacacaagtctttgtgtggacatgtgtctttatttatcttgggcacgaacctgggagtggaattgctgggtcatatggtaactatgtttaaccagctaaggaactgccaggctgttttcagaagcatcttagccattttacatttccaccagcagtgcatgaggcacagagttgttcttaggaggtttcactgagatgatgtttatgaagtacctagtatggtgtgtgacatgtagtcaaagaaataatagtttcctctttcccttgctttatgattataatatgtcagtgttcttaacacttttaactcttctcaacacataacctaaggctacctgctcacctaattctaaatctagggcagagttccttttcccaatttatatcacagttgcatagagaaagtttctttagtcaaattaaccccatgcatcaagggagggcatgctaggagcccccagcaggacctcacttgctcatcccccaaacataattgggagggccaacttttggcttaacctcactttatcactattgctcattcttctggcatcttgtacatctgcactgtcccagaggcacttgggaactcacatccaagtcaagaatatgctgtcttcttggcattagggttacaactcagatcatgtacatcctgcccagcacccagtgtctatagataaggcccaccgagcaaagctagaacaaaactctaggtatagaattccagccctgactatctaagcctccctcaagcacaatgggagtctgtaaaatactctaagataaaaggacatgaaagatgcaagaaataaatacaagcaagagaaccatggcaggggaaattcactctaagacagcctttcctgacttttgaccccaacacctttagcacgatgccctctatagtttgccccaagtctcttagaatacctcctttgtagtagctaggtttcttatggttgaaagttataaaaacccaacttgagaaagctgaagctaaaataggactcacttggctcatttaataaagaagtctgggaggggggagggggacacatctgaaatgataccaccacttaagtgccctctttcttatataaaggtctgtggccctttcctgctggagacaggcttctccatggggttgtgtaggtcggacagaagggtaggggtaggtgttgtgccctagatatttctaggcttaaataaatccagcttagtaatctcaagcacaaggaaagagttttttgcccaagtgtctgatataaaattccaggtcgagcttgggccatatgcccaccctgagtttgaaatgctgaggttggaaattccactagtactgcatggaatgggagacaggaaattccccaaagatggggagttgtttcccccaagatggggaatcttgaatagacaaacataacagcgctcctgtgtgtggttttccatcttctcaacaagaaccacagagtctcccagcacctggctcattggcatttaggcctccttataaccacaccttttacctactgaatgcccaggatctgccaggcactacccatgggatttccctaatcctcccaacagggttctaagataggtgttagcaccccattctacagataaagaacctgaggctcaaggaggtcaagtaagttgccaaaagtcacaaagctagaaagtggctgagctgagattcaaactctgaatccaaatcccatgttcttttctctcattccctctccttagtgacaacccaacagccagctggcatctgcatgctagccgccagcacaggtgtgttctcttaaactttctgacaatgactgaagccttttgaaggaggttcctctgcctctctccattccccatcatccttaggcaggctggctcccaccagaggaggctgggatattcattacaaggctaacaagcttgtgcacctgtcattcagtgacagcacctgaataagctttcaagactcgcacagaaggactgtctcccaccaggcagggatggcaggagatgttccaacagggttaggcattgcctgggttcagcagcagccacaattcagcagaggggtctatcctgggtgttctggcagctggtgaccatgtcctctggttccatgctgacaaaatgacagcctagcaggcagccaactttatttccaagcttcaatgggcaatatagcatgtggggtctggagccagactgtctgggtttgaatcctaactctctcactaactctacaacctcagtcaagttatttaactttctctgtgcctcagtttcctcatctgtgatattaccatcaaggtattgtcatgagggaataatagaataatactcacaaaatgttttaaactgtgccccataaatgccagccattactagtccagtggctctgtgtacccttgaccaaagggaagaggagggaagggagggatagcagttccttgtgctccagggtagaatgactagatctacctcctcccaggggcagctatgacatcttagctatcacccagatctggctcccaagttgtcttatggccctggatgcttcacttgaccctgaagagctttagttatgttatctgcaaaacaatggtgataacacctgccactccatgtagtttatagcagtgacagcaacatgtgaactctaaatgatgattcacattcaataagatgtcctggtgggattactgggaaagtggatgcaaaatgaaggtaagcaggacctttccctaagcagatgcaaaagttaagaccaggctctgggcatagaaatctgtgggggttaaaattctcgtcattcttatcaccatctccatcatcatcatcatcatcatcaccatcatcatcagaatatcaaatgttgttactaaacgcttgattgcatatggtaattgatgggactatttgaaaataattacctggtctctgcccttacctgtggataagttattctctacattaatggttctcaactggaggtaattttgccccccaagggacatttggcaatgtgtagagacgctttttggttgtcataaccagggaggttgtcacaaccagtgggtagaggccagggatgctgttaaacgctctaaaattacaggagagttccatagcaaagaattatccagctcaaaacatcaatagtgctgaggttgagaagccctgctttacactcttgatatttaaagtgtgactgaggtccagacttacctgggagattgtttctcaggactgttgaataagaatctgtatacatattacagttgaataagcatgctttaacatagtgagattccatctctacaaaaactaaaataaaaaaaatgaaccaagtatggtggcatgcacctgtagtcccagctacttgggagctgaggcagaaggatcacttgagcccaggagtttgagactagcctgggcaatatagaaaggccccgtctttaaaaaaaaattttttttaattaggtatgtgcagtggcacatgcctgtagtcgtagctactcaggaggctgaggcaggagaatcacttgaactcaagagttcaaggctgcagtgagctatcatcatgccactgcacgatctgtcactccagcctaggcgacagaacaagaccttgtctgaaaaaaatttttaaataaaaaataaggccgggcgaggtggctcaagcctgtaatcccagcactttggggggctgaggcgggtggatcacctgaggtcaggagttcaagaccagcctggtcaacatggtgaaaccccgtctctactaaaaatacaaaaattagatgggcgtggtggcacatgcctgtagtcccagctactggggaagctgaggcaggggaatgacttgaacctgggaagcagagattgcagtgagccaagaatacaccactgcattccaggctgggcaacagaacgagtctccatctcaaaataaataaataaataaataaataaataaataaataaataaataaaattttaaaaaataataattaaaaaatttccttaaaaaacccagatgcatagagaatacatagacagcaaaactatttaactattaagcatgtaggccaaatgcagggcatttgggcatagggaaaacagcagacagactaacagtggatgatgggaggatagatggattggcagaattaagatttgttgaacacctaacgtatgccaagcactatgtaggttctttacataggttatctcatttatctccaagataaccctgggcagcaggtattccttctcattgttactgatgcttacatatctaaagtctggaaagactatgtcaaccatgacatccctatctacacatatgtaacattttccagagtctgcctactgccatctaaaccagattatatggggaacatagtttcataatatgcttgtatgtaaaaccttatttacagttggcatttgatattaacctctagtttctcactcaagtagaggcttatcctttttacatgcacaagaatacaattttcttctttgttttctcttaaaagatcaataaacatcttgtttgcccttaacaaaagttatgtgaattctctacaatcagcacttatttccttttattaagaggatatttctacagttaacaataaagtttagtaacattgggtctttatgatccaaaaactcaatgactgcacaacagggatataataacaataatatctactatttattaaacccctcctgcttatgatcggcttcataggagcgctgtttatcacttcttattcccatttttcagaagaagaaactaaggcatagtttaggtcaggattggacgtaagaccttcctggctctgaagcccaagctctctgcctgccctcacactgtctcttactcggagtggtccttggcactccctggaatgtcagcagggtccagtgcacgcgctcacggttcccattctacctaactactctcattccacgtcagagtcgtgtttctccaggtctcctgcacccttccatcagcaggacccaccttccctccagctccaacttaaccctgggcttagaagatgtggcacaagaacttcaatgctaaaggtagatggttgttgacctggctcagggtcagcggacttcttctgtaaagtgtaagatagcaaatattttaggctttgtaagatatacagtctgcatcacacttactcaaatctgctattgtagcacaaaggcagtcagagacaaatacattacaaaatggatgtggctgtgttccaataaaactttattgacaaaaacaggtggcaggccagatttgggccccaggctgtagtttgccaacccctcacccatatgatctctagggtttcttttcttttcttttctttttgaaatggagtctcactctgttgccaggctggagtgcagtggcacaatctcggctcactgcaacctccacctcccgggttcaagtgattctcctgcctcagcctcccgagtagctgggactacaggcgcccgccaccatgcccagctaatttttgtattttttagtagagatggcgtttcaccacattagccaggatggtcttgatctcttgaccctgtagatccacctgcctcggcctcccaaagtgctgggattacaggcgtgagccaccgcacccagcctgatctctagggtttttgttaacccgctggtgttccgtggcttatgtatgagagaaaggcctagactaaagattgaaaaatggtgatccgaggccacatccagcccgctgacaggttttgttcgacccagagtgtttatttttgtgatgattttttaaaacatacccaaaagcaaagacgagcataattaacctgcatatacataccatccagcttccctatcaccattttgtcaatctcatctcatctatccccaacacaccttttagtttctgaaatattttaaagcaaatccagacattatattatctcacccataaatacttcagtgtgtctctctagcagacaaagactttttaaaaccgtaaccacaaaaccattatcaccctaacaaaatgaagaataattccttattagtgtctatttaaattttcctaattgtctcaaaaatgtctttttacaggtggtttgtttgaatccaaataaggtctatgcattgtattcatacagagcttttaaatttttgaattagttgtcaacatgtgaaaatctggatttcacataaacatcaggttttcagcttgtcttgaaaaaaacctggaagatcttgcaactttgccgcctccttccccagcagcaggagatcagtcggcacacaatttagacaatgacctgccttctcctgcccccactatggcccccacattgtcaccccttcaacagaatccctgagggcattagagtttgccatttctacttttgccgatccactcgctccctctcccctcctatacaaagtcactcgagccattccctggcctactttgccctccacctatgccaaagctgcccctttatcattatttttcctccttcaaagcaaattttcagagtgtatctgattccagaagggtgagcagagaagagggatttgcccagcatgatcagccacccctctagccccttggggtggctgcttacagggaattcaggaaagctccccagaccccctacacacacaccctcccacgctggctcagtttgtgcctgttgctcacagagcacagaaaccttgctttcaggtggaaagagaacaagcctgcctcaaatttgctgtgtgaccttgaagaaatcactctccctttctgggcctcaattgccccttttatacaatgaaggagttcatgagggggaaggtcggggaagaggatggtccaaattgaattgccaggtgagacatgaacattctggagcggacaaccttgtgatcctgggattctgttggccgtacacggcctcttcacctcatcactaggatggccaagggaggagggagaggggaggggacatgaaatggatcaagagcaaggccaggagaggtgccaccttcaggtctgagcaggagggggaaataacacacacccctactttcccttccaccttctcaggccatcatcttctgactgtgggtgcacattggttcatgattctctttccctttgggtattgactggtcctgtctggccatgcctcaagaatggcacatataggatatccaccaaggtaggaaagatgctaaggctggctgtgagcctctgtgggggtgtgtccacatagggaagaaatgggatggtggtgataggttcagggtctgaaaaatatgattcagacagtggcccatcctgggtgttcagtcatgccaaggagtccagcttcaggaaaaccaggtggcagtcccagcccggtggggcagtcaaacacataaacaagcaattacaacaaaatgcggtaaataccagagtaaaaacatgcatcagacaccttggaaacatagaggaaacgatctatttgttcatccagttatatgtaccccaaccgtgttccaaaaatgatatgtaccccaaccgtgtcccaaaaacgatttcaagaggccagcaaagctcaatacagataacaaagtgaaaattaagtaaatgaggaaagggaaatgatgcaggaagaacaagatgaaatcaagggtaaagttaatacccaaaatatctgccgagagtttctacacttttgctagaattaagccacagacttggcgctgagcttcctagcagttgatgcaaaaggagaaagcccgggagttgtcaaatatacagtgttcctaaaaatacagtctgaaaatagctctggagatgctcaagcaatcctgaggctgagaccagagagataatttcctctctaggctgttctaaggaagagcccctaaagccacgggagcagtatgcggaaactctctgcaccatatttgcaactttcctgtaaatctcaaaatgttccaaaattagatttaaaatagaaaatccacaggtagagcccaattgtagctccaagtgcccctccgcactgcacggacctgacataaattggtgctattccgatttgtaactccagggggcgccatgcacacaggcacaaggtctgacacatagtaggttctctatattgtaaatatcaactgataaacccttgagtggtcaaaatggacattttgggggcctcgagaaaggactgtctattatacatgaaggatatggaccctgaactgagggagtacttactagataatcccaggtgtttaggggcattttaaactaccttgataggcatcaataatttgacattttcgtctatgcctattggtttctgtaaatgtcatgtccttgggcagtaacaaagtcacaggatagaatttagagtaggatttgcagaaccatgacaagatttgggagaaccattttgaataagcaattggactttaactggctctctttttttccctttttcaaaactattaactttaaagtgacacaataattttctttcagtaaaactatagttgttcatcaccagaacattatccgggatatctgtccttaaggctacaaggaaaacaagatgacgggaaggaaatggaaggcatgagaaagatgctatgctgaattctgaatgttgtcacatatggcctgccttattttagtcacattaaaatccctagttgatctctagaccaatacaacaaaccacagcctaaatctgtgactgggcctcacacaaaatgatggaattcttaaccagaacatgattcttagtgcgaatatataatcctttagtaaaaatgctgtggtgtactttttagctatacctttgtaatatggatacatctacctgagattcccatttccagccgccactccctcagcaaaaccaaaacaaaacaaaacaaaagacccagggtaatgggataaataagcaatggtctctaatcatgcagttgatacaacagtaagcttcctagggcaggaacgtcagggaagctttcccagaagaggtgactttgggctaagtcctcaaggataagtaggaggttgccagttcgacaagggagaaacaggggaaggcaaggacttttaggcagatgggaaagcagtgataccttccatttgcccctttggaatcactctctccaccctcctctgggacccatagcttcccacagagtttggccaaggggatgctgaagatgttggtgcttcccctgctgcagccagcatcgacttcctgcctgaactttgagtggaggaattagaggagggcgtctaaagatggagctaatggtgcactttaattgggaaagatgaacatgtgggttccagggcatacacactccctgctctctgtgtggaagatgatgccagaagcctttccaaggtgagttacaaacaaagtgccccaaccagcctgctcaccaaacctcctaattatgccagccttgagccaaaaattctatcctaacccaatgggagggtggaggtcagagggatacagctgtctgcctgagttccaatcacaggtctgaataggtcatttcttgtatcacgcatttcccccagaaagggctgaaatgcttttccaacacaggagaggtcagaataggaccagtcacaaagccagagcttgtggtctcagagaagctgcccaggagcctccgggcttccactcctctgcccacacatcctcccaaccttggtcttgtggcatctttccagacactgtcagggatggtaggccatggaaagattcaaagaccaggacagtggtgctcagaactttggtgcacaacagacttcagggagaatgttgacaataaaaacatcaggatggtttagggcatctgtgtggttagcaaactccctgtgtgtctctgaggcatgccagagtttgagcctactggacaaaggaaatcctcagatggaaaaaggatggatgtctctatttggtaagcatttattattgtcactactactattaatattgttagaagaattgaattttacagcaaatgttgtaatagtcaagtagctgaatgataattaccaataatgataatatcatgatttgcagctactgtgtaccaggctcattttgtgcatgaaaacatatccttacgtaaataaaatgtggtacatccatacaacagaaaattattcagccttttaaaatacaggaatttctgacacatgctgcaatatggatgaaccttgatgacattagctaagtgaaacaagccagtcgcaaaaggacaaagattgcatgactccaccaatatgaggtacccagaatagtcaacttcacagcaacagaaagtaaaaaggtggataccagggctgggggagggaggaatggggagttactgtataatggggacagagtttcaatctgggaagataaaaaagttctggagatggatggtagtgatggttgcacaacgatgtgaatatacttcatgccactggactacgccctcaaaaatggttaaagtagtaaattttatgctgtgtatactttactacaattttaaaaattatttcaataaagctaggttggaaagtgaagcatgaacttcagagtcaggcaggtctggatgtgaatcccagctgcctgaacaatctttggcaacgtgacctccctgagcttccactttcttttctgtgatatgaggagggggcaagaagcaacatcttggggtgtatggaatggcagccattttacaaaaattatctcagatatctgtcccccagccctataatgccagtgggtaattattagcctcattttacaaatgagaaagttgagcctcagtgaagtgatggagtgtgtgtaaggtcacacagtcaggaagtagaagggccagggttcaaaatataaagataaagatgaacataaaactgggctctgtatttcctgcattatgatcctccagacacatcttgaagcacacgcagaatctcaccttgggtttgaagacttggagggcacaaacccagatgcccgatttagggaccactgttcagattctgatataaaacctactgttttaaaggccattacccagcacctctcagtttatgggcctcttttatatttacaagtcctatgaatgtgcaattgaaatagaccaaaaaatgtgtctctagaatcttacgtgcttggaaatcaaagcaggacacactggtgaagacagaagttgttccaaaagctgaagtctaaattatgggaatcaagttgaaatctcagttctcagagtaaagttcaaaatacataaagaaccagacaagataacaggtatcattgccaagagaagggaatggaacttcagcaggaaaaacaagcccaagagagttatcagatgctaaagacccagggtttccatgccacttccccgccgggggcctcacatggagccccctgactccaggatgtgccattcacatgtgctattcaataagataaatggtgcccccttaagttgtgcggtatgccagccggctccatcttcaggttatgaggatttctaaagagatcaaccatggtggggagtcaaagaagatggtgaagtaagatgtgggaaatgccctttcaaaaggtgaaagcaacatatccaacatgtgtgcagcacctggtctgtgtctccttcctaggtcttcacttgttttgtctcattttattctctgcatctcccatttaagaagctcagagaggttcaataacttggccacagtcacacagctagttttggtagaaccccagttggaatccagatcactgactgcacatcagtccctctccatccagccaccagctgagaggactccaagccagtctggacatgattttaaccaggccaaaccaggctggaagagccattgagggctgatggaaggaggaaattaagccacagaaaggtaacctgaagggtttggggtataaacagagggaggaggagacccagttcctctaagctctaaggaccggggggatgagaattgaggggttactgttgattagcatcagtgaaaactagcatccagggtagggagctgccacttgtctccccactttcccaagtctctgtctttccaggctttactgagggatgaccagtctgtccctgggttctgaacattctggaaatggctctactggggtattggagggtaggggcactggaatgcaaagctctgactttgggtcaggaagcctatctcaggcacttgggtccagaagtggcctgtgaactcagcattggatgggagaaagagggactgaggtcttgtcctttcttggcccctttgagcttgactttgggtgtgtcaccttgcctctatgacactcagtttcttacttcaatatagtacaaggaggttagacttagatgatatttctaactgtttttccatacctaacatcctttgtttctggaatttgcctctgctccaatcagaaaggctagagtaaagccttctccagggcagtggccttgttttgcaggctcacttggtctgggtggctcagttgtgtcccgcccttctccttacccacatgctccagggctcaggcttcatgaggagaagtgggggaggggagcagcagcaatgcctccctggttcccagcacctccctacctttctgaatttttaaaagtgcctttactcaaagttcatcaaaaattcatcaggcttgggattggcccaagtgtttgcctgaggagccaagtcaaggtggaacaggaggccagcaggtggtgcagacctctggagctgcactgagggcatggcacaggcctatatgctgaaccctgcaccaccccgtggagagaggccagagaccagggcagcagcctgcctggggaagcttgatcccacctctggagacaacctttcatcagcctgggccttaccttctgcaaagtaggagtcagagcctgcctgtccttttcaaggaggtcgggaggatcgatgaggcaatgggcaggcctcactctttctaaagtgagggctttaacatatggaaagggaattggatagcatcacaactgactttaaaggaaggtatttgagagctcctgggagagcccagtgtttccagcctgggcagatgcaaggggaagaagggagattgctgggccaaacactctcctctgggcttccagtagctcctttcctcatccaccttgtctctttagctgctacagaagattctgttttggaaaaaaaaaaaagatgctgttaactttttaaagtttgcatagcactgaatagtccactctttctttagagaaaaagaaacggaggccctgcatggagaagtgactttcccaaggccattcagccaatcagtagcagagatggggctggagcccaagggttctagctcccaggccaggagcctgcctgcttctgcatcagtttcaccttgccaatgcctttgtctggatgtgtccttggtcacccaaaccagatgtcagcttatctgaccacagaaagacattctccaagtcagcatgaccaggttaagaaagtgagtggatcttcattggacgcccatgatgggatgttcttgtttgtgtctggcttataggtgcccctggctggagtctttctgtggaacaaagtgaagaccctccagcccccaacaggtacttgggtttcagtcctcagagcactgggttatctggtccaactctctggttttcagatgtggaaattgaagcccaaagaaattgtaagtcaagggcaggcatggtgtgggtcacacctataatctcagcagtttggaagacaaaggcagaaggactgcttgaggacaggggtttgaaaccagcctgagcaacagaaccagaccctatctttataaaaaataaaaataattaaaaaattagctaggcacggtggcacacacctgtagtcccaactactctggaggctgaggtgggaggatcacttgagcccaggaggttgaggccacagtgagtcatcatcaaatcactgtactccagcctgggcaaaagagcaagactctgtctctaaaaaggaggaggaggagagttgtgagtcaaattgacactaggcctcctgggtgcccagttagtgctcctgccacatcaccacacctccactggttctctgttctcctagaagtcccctcggcccctcctcccccagaggtgtcacgaggctggggaggtatggggatccactctggaggtcttcacctctcgcactgtatcagagagtcttggccagctctcagaaccagaaaacccactgaggaccaagcaggaccataaaccgcaataatcatgtttttaataatcgcctagagtttgtttaacatacaatcacagccagcaataaatccaaattaaaggcccaaccaggaggcctaagttaagctgcctgcttggaaatagaacagctgaagaagaggaggggagaggaggaagaggaagagtaggagcaggagaaggggagcagccctctgaggaggtaacaccctcaggagggccagggaggtggccccaagcaggttagtaggttcctgcctggccctagctccagccccaaccctagcacaggtcttgctatcttcacccaaaaggatttctcaatggttcaagcagagaaaatatctaagttccaaaacctcagagctgcaaaagaaagagacaatattcactcctctgcctgtgggcacacaagctccataagggcaaggaccttcttgttatgttcagttctgtgctgcccccagctcctggcatctagtaggtaatcagcaaacatctgttgaataaacacatgaataaatgagtgagtgtgaacgaatgctttcccatccatttattcattcatttgggatatttttccctctcaaatattcattgagcaactatagtacctgcaggtacagagatgaacaagattcctgtcatctagaaactgagtgccaaaggacgaataacagagatgactccagcctaagggggcctggccaggccagcagtgaagggtgggaagagtaaagggtttcagaaggggtttgcttaaagctgagttctgaagagcaattaagtgttaaccagactcgcaggagcctagacctgggtgtggcaagtgatactgaccagaggataatgttctagaccaaaggggcagcatgtgcagagcaggggagcaagagaggatgtggcattgcccaagaaccacagagagttcagtggggctgggaacagaatgagagctggaagccgaggaggaaggagggagggaggtggacagttggcaggggccagccatggacagctgtgtgagccatgctaaacagtttggactttatcccgggggcaaaagggaacttatggaagtgttttaagcaggaggttgacatgaccagaattgaagtttggaaaaatcgctctagccgcagtatggagaatggattagaggtgagggtgcctggggccaggcagagccgtcaggaggtggctgcggtgatccactgagaaaagcgagggctgggaccagtgagggatgttgacacagacaccaaggagggccaaactcaagggatggggagggagcaaagggcggcagtgactgagtgtgggagtgaggcagtgggggcatctggtgtctcccagtatctcaggtgagtgggcaatagcagtgccgctgagaaccgaagtggagcatgctggccaagacactaggtctcctgcaaaggcctctctgggaagatatagccacttgccgcctgcaagggaggacagacacactcccctaggtctgcctttggtccagtttggaaactgaggcctagggagggtagagactcacccaatgtcactcagcgagctagtggcagagctgggaacagaatccaggtcacctgactgggagcagaggcattacagtgatggcatagtccagattccccagggcagctcccagtccagatataccatctgcctgttctttttaccacacttgagcttttcaagtctgtgtcccccctgaggggtcagaaaacaccatctctgttactgcactaaagtgcagaactcaaaggctacaccgtcctttagactctaaccatggaggagaaaggaaagaaaacaaggcattgggacatctggtttgagtccttccttttctgcttgcttaggctgggcaacttcctgaccctctctgagccccagactcatctgtaaaaagggaatcaaatgggctcaaggtatggattgaataagaacacacacatgaaagatgaactgtgaagcaccacagataaaatgatggtttattttcacatcaactcctttaacaaatatttggcctctgcctgttccattccggacctgcctggaagcaccatggtgcatgtggagatgactaagacaagggctgcccgtgggaaccgtcccctggtccacaggctctggaatctgagtgaatccatacagaagctgggggctgggtcgcatcagcaggtggtcttacgtgccagggcctcccatcccttgcactgccccaggtctcactcacactatatcctcaaccttgaattcccacctgggactatcatcccaagctatccaacattcattcaacacacctttactgtatgccaggcatggagataagtgctgcggtccctgccctctgggaacttacaatctgacaggcctgggtgcatatgggtccagtctgcaagcagctcatggcacactcctgctcaaaaccctcccattgcacttaggataaaaatcgcacacctgcccttgtctcagggatgtgtccaccacactgacctcatgtcatagcactacccctcacttgtgccactccagagacaagttcttcaaacacaccaagaacagtcccactgcaaagcctgcgcacgtgccataccctctgcctggaatgttcctctccaaatacctacatggttcactccttcacttcattcaagcctgcacaaatatcccctcctcagagatgctttcccgatcacccttgctaaaagaactgccccaatctcatttcatcttcctaacctgatgtatttcttcaaagcacttactatgacctttcttttagattatttagattcaattatatttttatttgtttactatctgtttctcccaatgcaatataagctgcatgagatttgatttcgttaactgctccccctcagtgcctgcaacagaggtcaataaagattgattgattgattgatttgttgattgattggatgagtgaatgcctgagtcaatacttgtggcctttgtgcgatgagagaagcactgactgcttctccctgactccaaaatgcacttttcaaaaacacttactcatttctgagatggaaatacatacatttagagcagggtttctgttcccccaaaagctattattaaatcgatggtgcatctcacaatcgatggtatctcacaattgagggaatgcacagtaacccagagagggcagggagtcctcctccccaaggagactcggtggaaacttctccagacagataatatttcatggagctttaaggaatgagtgagcattttctgcaatgaggtggcagaaaaagcattccaggcagaggaaacagcacatccaaaggcacaggggtctggaacagcagctgtttgttgccagaagagacccatagtctggagcagctggagtggaaggcattgggggtagtgactaaagatgagatgacaggtcatttagaaagggccttaactgcccctccaagggacatgagctttgttctggaggcagatggtagccatggaggggtgtgaattcctcattcttctctctcatgtccaccccatatcagaccacacagaaaagcatgcttccggatttagtagggtaggttaaatcctacatccaaacaccaaaacccaaaatggatttttttctactttctctccattatgcaggtgatttgctactagacctgtttccacttggccttcagaagccgagcctgtggggcatggcactccctttggcatcccctaccaggcctggggaagggcagcagtctggtcctctgcctgcccaggatggccttcctgcctcagggagattgatttccctcctgccctggaaaggaaagaaaggaggaagcagagccccaagctgcctcctgatactaccaggtgccaggcactgtgctgagcacgtcatatccattaccttctctccctgggaggtgggtaacactgtcattcccatttcacagatgaggaaactggggctgccgctccagcacctgccattgcctggcccatagtggacactttataaacatttcattttcccataacattaactgggcactcactctatgcaaggccttccaccaggacctgtttctaaatgctcatgctggtctctctgaacggagtcccctgtgccccttcacacctggaaaactccatggattcttcaagttgctgctcagatgccacctcttctgtaaggctttgcctgaccttccccagcaggacccagtactctgtcctctgcttccctcccactctgcacagcatgagacttcccttcttctagggcaggaactgagcctagcacacaatctggcatacagtgagtcttcaaaacatattggttaaatgtgtgagtgagtgaatgaatgaatgaatgaacgaacaaccaagtgatcaacaaaaagatgctcccataatggagagcagaatcaaaagtggggaaatataccaagctgaagtaggagtcagggaaggccagcttccttccaccaagcttaggatgtcagagccaggaggaaggcattctgggattactccaacccggggtgaaggaaggatgaggggagttttcacagaggaagtagcttcggatagggctttgacaggagttacaaaggacttgcatgggaggagaaagagcagtaggaaaggccaggccagcttgtcctggcagcagccatgcctgagggtgggggcccatttagcaaatggagctcagcattcaaccgcccttcaccaagcaccagcagaacagaagtaatctttgggtttgcagttaatttgttcttttaatggacctgtattgttgtcagtgattaaaatgggcttcccccattagctgctggattccagggaggcagctggtttcccagcccctctgccttaacaaaaagtgaatggacgggcacatatgtgttcaggactggggggagctgggcaaacacacactagctcagaggcatgtgtacccctgtggatatgcacggtgaaacttaaacacaggctattttgaacatagagactcaagtccagtacatttaaatgtgaatcacaccaatgtctgcgcatatggattgaaaagattcagtgattcctatattcatgaaaaggctgagctgaaaaaagccttagagaccattgaatctaagccttttttttttttttttttttgacaaataaaagggaaatcccagaaaggataatcaactttcctgaggctacacagcaccttgatgccagagccaggtctggaaccctcctcccctggtctgtgtcagggacctcctaaaatatgagcagcagcagcaggtctaggcacctcagagcctgagttcccaactgtcctccagggtctgccttcttgttcattttctgctccaccaacctgtttcctaaacataaatgtaattacggcatcacagttcagctcacaacagttctacccgctgacatgtgtgcagcactttacagtttgcaaactgctgcacctcattaactctcagtctcaaaggtaggcagagctggtattattttaatctccatttttcagataaggaagccaaggttcagagacagtaagggatttttccaagctcacagcttgaaaagataagaccaaaattcaaagccaggcctcccaaatccaaatcccagttccccccaaaagctgttccatggttgctgagtgcagaaaccaaggttcgttcttctaaaattgcattcagaaacacgacggtcaagaagcacacacacacacacccatcaccccaacacatgtgcccgaacaaatgagcaaggctgggatgtgttcatcagcctcccctattcatacattccctccccaacctagccaaggctggtccaaatctgctgacactccgggcacttaataaacaaaaacatcaagtcactcaatcaataagctcagctgtcaacaacaagcgagggctgagcactcctaagagctaataatgctttgagctataaacatggccattagctgggctcctgccctgccaggcgggctctgccactgtaggcaggggtacctgcagctggaggccgtggtatttcatggtcggctgaacccaccagcccatccgggctgggcttttgctgccacctccttcccctgacatcctgggtacccctgcctgggacataaggaggggctgccaggctaagaaggccccaactgaatcctcccagaaaatgtggaaaccccaagggccaccacttccagggcttctgacttggaagcctgtgctgcctccacaaccacatagtgccacccttgagagctgccagtggatgatgctacacatcagccttggaggagtcccattcagagaggatgccagactatctgcatttgaatctggctcggcaacttagcagctgtgggaccctgggcaagttacttaacttctctgttcctcagctgccttatctgtaaaatgtaaattacagccatctcccaaggtgactgtgaagctcctgaggtggctgttgtgacttctgtgcctagcagaatgtccagcagttaaatggtgcctgggaaatgacacaagaggaaagtaatccatggagccacctatgtgggtgggagaagccagcacggttgaaagggggaggaaacctgagccaagaggacaatgtccccaccctcctgtctcccataccttgatgtcaagcatggttgggcagcaagcagagtccacctttgtccagctgtttcctccagatgatatctgaccttaaaaattttgttcagcctgggcaggtgggggaggtgagggattagcaggcctggatggtaccggaagacaaaagacagtggcctgccaggatgccagccctggactagggtgggcactgaggccccaccctggatcctaaatccaggcacaagattacactactagactcttcttttaaatgagtataaaccttggcagggagttgcaccacctgagctgttgttgcagcatgtagaatcaggggtcatgtactcctccagcttcccagaggaaaataagatgccttctttgtaagtaggattacttgtcagcacttttgacattccagtggcttctcctatctgtctccctgcctgcctgtctcacagtctctgtctctctcctctatctctctctatggctctgtgcctgtctctgtctgttcctttttgtctccctttatctttttgtctctattttatccctcagagacagtgtgagcacacacacacacatatgcacatgatcttatttcacctaccactaactcttcacccagttcagaattcctgggaacttttggataagagttaccaccaatgtcccaaggttaaggagcgaagcatctgccaggtatgacggttcagaaccatggacagagtttcgtggctgggatctcctggcccttaaggaaggagggcagctcacagtgtcttggatgggtcaggggagtaggggaagaagctcctaagactggcaagggaagaagaggaggagcctggagaggtgtgaagggctggacctgtgaaaggaggtggaagtgagtgtcaagtggtgaggctgacttgggcatatctgcgtgtaaaagtgaagtaaatgaaatgtaaatgccgtgactgtgtaagggagttgagtggatctgaaggcagctatgaaggccatgctaaggaatgcaacccagagtgagagctgtgttggcttcagccttcctagggtttccctcctcactgactcctggaatccagagtgagtcccaggggcagcagagacctaccaagctaagccccagggagcagcaggagagctgagtgcctgtggagggagggcaggcaagagaagcaggacattccaccaggctggagggtaaatatttaaagggctgtttccatgtgtataaaaactcagtgcatctgctaggcagtatttgcagaagctgggaggggagagctggacccaggccagccaagaagcctgtttaaaccctctaactcacagctccctcaacccacactgcaccggccttctggctcttagagacacagagccctctgcctactgatacacatgcttgcacacaacaataccctgtgtacagggacatgactagacacacaaacatacatacatgcacgcacacacatatgcacagctcactggttcctacagagatgcacaagtgaacacacactcacagcacccagatacacaccacagactcacagccagacagtgcagatagcacactgcatgccagatctctctctgtctctctctctctctctcatacacacacacacacacacacacacacacacacacacacacacacacacacacaaacgcaccagccacactgtatcacatacccaatcagaccacatagctcacatatcattacaaatacatccacagtggcctatacatctcacatggtaactcacacacttggtccacatggcatcacacccacaaatgtctgtatgacttacactgaaacacacagagaccaagaatcacacattaaacaatattacaggtgagccagtacatgcacagaaagcctgccagatctcaaacaggaatcaaatacagtcatcctccacgtaatgctgtttcaatcaacaacagcctgcatattcaagggtggtcccataagattataatggagctgaaaatttcctatcgcctagtgatgtaatgttgtagcacagcccattactcacatgtttgtagtgatgctgctataaacaaacctacaggactaccaattgtataatagtctagcatgtacaattatgtatagtacataatatttgataatgataataaaggactgtgttgatggtttatctatttactataccatgctttttatcgttagagtgtacaccttctacttattaaaaaaaatgtttactgtaaaacagtatgctgtgttactccagcagcagcctcatatatctcgtttactgcacttcttgattgcactgttttctcttgtgcttgatttaacctcacaatgttttgttcatcatagccccaaagtgaacaaaatccactgctaatgttgccagtaagaggccacatcaagtgattgtcctggaaacaaaattaaaagtgattaaggactatgaaggtggagaatcagtgatggttactgctcatcagtcaggcatgtgtcattccaccatagctacaatcttgaagaacaagatcaaagtgacagaagctgctaaaggatctgcttcattgaaggcaatgatactaacaaaagttctaaaagggcccatatcagatagacagaaatttctaatgacttgatttgaagactagacacagaagcctatccctcccagcaccgtgatgatcactgccaaagcaaaaatttcgtgatgttgaaagaagatgctggacccaactatgatgttgaatttactgttagccccgggtggattaaatgattcaagaatcattatttattacattctgtgaaagtgagtggtgagttttcaagtgctgatgtgatggcagctgaagaatttttgaaaactctggcaatctgatcgtggaggaaaattacttgccagagcaaatcttcaatatggatgaaagctgcctattctggaaatggatgcctgaaaggactttaatcctaaagaaggtcaagtcaatgccagatttcaagacttttaaggacaggatgacaatcttgcttggggacaatgttgcaggccacaaattgaaaccctttgtgatctgggacagtgagaaccccagggcctcaagcatatcaataagcacacatggccagtgtacttcaggagcaataataagtcatggatgacccaactcctcttccaagacgcccccttgagttgctatgccagcaaaatagagaaatgctgtttggagaataacatacatttcaagattttgcttattgttgataatgctcccacacatccctcttttattggtgatcttcatttcaatatcaacgtggtctttctgtctccaaacaccacctctttgattcaaccaatggagaaacgaattatagcagcttgtaagacctactgctcagggaagatctttgttcaggctattgctacaactaaggaaggcactgagaagatattgacgcaattctggaaaaattacatctttgcatcgtgaaccttgcttgggcttaagtgatgtcatcaatgagtgtatgaatggcatctggaagaagacactcaagaggtttatccaagcttcaaaggattttccaagcataaggggattaaaaatcaacaaggctgtggttgaaatggcaaacagcttcaacccgggtgtggatgaggatgacattgaggagctctcagaggtggttaatgaagaattgactaaggaggaattgttggaactggaacaggatcacatagctgaagaagaggcaagaaaaagggaaagtacaggagaagaaaaagaaccctgaagaaaattcacagtgaggagtttagcagaagcttttgcagaccgcaacaagctccttaaaaggtttgaaaatgtagaccctaacaacaaaaggtttgcattaatagagaggaatgttcatggtgcattatttgcttacaagcaaatctatgatgaaaaaagaaaacaaccaagcaaactaccatggatacgtttctgaaaagagtgacactacctcaggaacagcctcaggcaggtccttcaggaggaattccaggagaaagcaccattatcacaggagatgacagctctatacatgttattgcccctgaagaccttccagtgcaacaagatgtggaggtggaagacagtgatattgatcatgctgaccctgtgtaggcccaggctaatgtgtgtgttcatgtcttcacttttaacaaaaaactttatgaagtacaaaagaaataaaaaattttaaataggaaatctcttatagattaaggatataaagaaagaagatattttgtacagctatacaacatttgtgttttaagctgttattacaagagtctgaaagttaaaaaaaaattaaaaagagtttacaaactaaagaagttacagtaagctaaggttagtttattactgaagaaagaaaaatatttttaataaatttaatgtagcctaaatgtacagtgtttataaagtctacagtagtgtacagtactgtcctaggccttcaagtccattcaccactcactgattgacttacccagatcagcttccagtcctccacatgccattcatggtaagtgttccatacaggtgtgccattctctatcttttatactgtatttataccctaccttttttctatgtttgaatatgtttagatacacaaataccactgtgttaaaattgcctacagtatgcaacatggtaatatgctgcacaggtttgtagcctaggaataagaggtcatactatatagcctaggtgtgtagtaagctataccatccaggtttctgtaagtacactccatgatgtgtgcacaacaatgaaatcacctaatgatacatgtttcagaatgtatcttcatcactaagcaacgcatgactgcatatactttaaatagcatgtcacactcacacataagtgtgcacacacagacatttaacactcatgaactcacatagctcacacatcagtttacttattaaaggcccgagaaacatcctgcagcattacatgctaccttgcatatgccacttatcaccactcaggaggcttgagactataagtataaacactgtacatttagactacattaaatttattaaaaatattttttcttcaataataaactaaccttagcttactgtaacttgtttagtttgtaaactctttttaatttttttaactttcagactcttgtaataacagcttaaaacacaaacgttgtactaccatataaagtttatatggtagtaattaagagacttactctggagtcagatggcccgggttagaatcccagttctgctatttataatctgatctcggaggtgctcatgagaattaaacgaggtaatgaatgatgaacttagaatggtatcaagcacatgaaatgcactcaataaaccctataattattatacggtttgcaaatatttacagtgcccatttcacaggtaaggaaattgaggcccagagagttgaagtgatatgtccagaaccataagaatgataataaagatggcagtggtggggataattgtggtgatgatgacaataatggtgacgatggtgatgacaatgatggtagtgatgaagatgatggtgatgattatgatgatgatactgatgctggtagtgatgatgatggtggtattcatggtgatgacaatgatgatggtggtggtgatagtgatgatggtggtgattatgttgatgatgatgatggtgatgatggtgacagcaatgatatataacagcagatacttatttagcacttacaagagcctaacatagtcttcaatgctttcatgtatattatcgcatttcatacacataacattcatatgagataggcactatgattatccccattttacagttgaggaaactgaagaacataaatgttaagtaatttgccccaagtcgcatagtgagtgattcaaagaaccatgcagctctggccaaggagccttaactcctctgacttcccttctgctcttctgtgaaatggtaacaactatgtctccctcagagggattgtttctaggactgggcatatttgcaagcataaatggtctttgtaaactatgaaactatctatagatattgacagcagtaccatggatctaggaacttcacagaaagtttggctttcagtttctgtgatcagagaggcatctggatctctgtctggttttcttgggaacattcacaaatgccagaattctttgaagaaagtgctcagagagagatggttctggggccagcaagggtagagccttgggagcaaactggtttacatgactttttctagcaatgagaaaagttacatctcagttcagcataggctatgttacactgcagtaacaaccccaaaatcatcttgttgtcattaaatttccatcaccattcagcaggaggttctgctcagggtcgccactgggccccggactgatggagtggctaacatcttgcatgttgccagtcactctaccagaaggagaagattgctctggagggtcttactttggcaattaagcgcttggtctggaagtgacacatgccaattctgctcacaaagtgaggagacagaactaacacaaaaccccactcaagaggaccaggcacagcaatcctaccatgtaggtggggaacaggtggggacagctggaaatagctgtatagcagtactaatgatggccacaaggaggaaagaagcagcagcaatggctcaaaacaaggggagtgctatgctctgcagccagaactgctggggtggatccgcctgctgtggcaagcacacctggtcctgagaaagcttccctcccagggtgatgttccagggaagacttggactatggagtcctagagatctggatttggaagctggttttgcaacaattctatgtaactgtggatggttatatcctctttgagcctcagtttcctcatctgcaaaacagggtaagctccctaccaaaaaagatgtcgaggagatagcacctgtactgtgctagacaccatgcttggtacataccaaatgctttagaaagggtggctattcttctccaagggttaaggcattgaagacacctatcctccaccctggccccagcctctgagcctggactttcccacctctcagtttatcccaccctgtcggcctcctgctgtcatcaggtgtctgcagtcctgtcatgccttgcagtgacactggcacatcctttacgcatgaaaggagagaggggaatgctgcctacctggaaaggagtgagccaaggaaaacttcagtggtttatatgcatgctcattaatgaggaaaacaattatccccccaaacgtagggacttgatgaagaagagatcttccaaggtagcacaggtaccctcatcctgagaatctgcctctcccgcaaactatggttgcctctgggtccagaatgattcgtgggcatccccagatcaggtgggtggagaagaagaggtgggggtctgctttcctcaagcccatacttcctcagcttccttatcttttctctttattctttttcccaagcacatgtttacacccccatatctccaactgctgcccataagtgtgcagctcccaaattgctctctggtccaaacttctctctcaagctcctagctcatgttctccttgcctcttgtgtatttccatgcccaagtccacagacacaccaagttcagcctggtccaaacctaacttatcttctctcccagccctccccaacctggtcttcctcccacattccccatgtaattgcatgaacatttaaagacatccatttgttcaacacaactttaatatcctctctctagcagaccctgtgccaggagctggggatacaaaaatgaaggacatggtctcagtccttggcaagttctcagtctaaacggaaagacagacatggaccaagcactgtgaagcaattgcagggacatatgggggcaaaagagggagtaatcaactttgcagttgaggctggaagtggttagaaaaacctcccagggaaggcaacttgaaaggtgagcatcctgggaacaggtgggaggtggcattccaggcaaagggaatagcaagtgcagagtctctcaacatcacagcacattcggagagcacagccatctgtggctaaagcatcaggtgcagaattggaggaaaggagtgagtaggggtaattaagtgcaaaagcaagcaggggacaagtatttcggtgtcacttcactatgtcctgagaatagattccctctactaatgggggcgcattgacaggacaagtgtgtgtgtctcatcaaggagtaagggatctctaggatcactggggactcccttagccaagtccacgttcaacaaaacctgccaaaaatgggaggtcatttccttttacctcgtagcttctgcttcctcttggcttatgcctcctcttagcttgtgctggccatgacctcttaaggccctgactcttcctcattttcctggattcttccgtaaactctagtaattctggagccttgggttgcctggtcttgagttaagtctaccccaggtccagccagctgaaacccagggagacccgtggctgccctttcactagggaatctgcacagatgagattgataagggaaacagaggggtttgagtagctcagccacctccaggtctagtgctgcagcaggtctacagggccttagaggaagtacttggactttattctgagggcaataggtatccatagatggattctaaaaacgaaagtgataaagcaagatttttgaattaaacagatgatgggaagatgctctaagtgcttggcagtgtgggccagaacattcatggaggaggtagccctggcccttctgcccataaatcagaggctctggggcacaaagtgcactaatgggagctagtcactaaagaaagtttatttcccagactcatggaaggcagagctcactcattcccacttattcatgtagataaggagcaagagtcttgctcaaagtcactgtatgagagtccaagctgaacttgagtccagtctctaatccagtgctgcacagcttctgtggctgaaagcctccccaccttacagaagggaagaagccgtttctaactccctataaacaactgggagcccccaccacagctcctttatgaatgcagcctaaacctatcaccccactacctccacatcctatttttctggactaatttgtcaaggacagaggcagccaaatcagcaagcctgctgctgtgaaagccaggtggcagggaggtaaaaatccatgataggaggccctaacaccctttctggtccctgaaaaaaaaaaaaaaaaagcattctgaagcccacaattcaaacatgcagacaagcacacacatacaatacacacatagaagttgccaattcagccaaaaacctttcagaagtatctccaggctgcactgtctgtcctcattttagccagttctccctggagaactctgggtggggatcctgagcagagaccactacacagatcagttgccccctggtcctgctcaaaaacttacttttcctctctaggctttttgcctcttaaatctcctctttgacgtgtactctgtctcttggctgctttctgtctctatttctctctgtatcttcctggatcttaatgagtcttttgtctaggtcttcctaggtctctctgggtctctgccttggtctgtgtgtgtctacgtctctgtcgcgctgtctttttctattttttttctctgtttatatgactctttttctgtggcaccgttatagactagcagagtagaaagagcctttggactttatcaggcccaaaccggtacctgtgaaaatgaggaaattggagcccaacatgaggaagagacttacccatgaacatacatccagttttgtactactatgactaaagcctctcttgttttatcaaaactagagttttccacaccagtttgtattggtgccaagtagaaggaggagaaacaagataaggaaggcagtggagattctacagcagctaggtgcactaggaagagccttgaatcagtagataagaactcagttctagtaagagtaagtgaacatgttgcttaacctcaggcatgtcacttaccatctctgagcctcagtttcctcttctgtgaaatggagataactagaccaatcctgcctgcttcaaaggtctctgattaatttcttattagagaaaggatgtggaagtattttggaataaattataaagcatcaagcaggaatggaaggcaggacaaggacaataactgatgactgataatgatgatgataatgatggtagtgatagcaatgagagtggtaatgatgacagtggtggtggtaatgagaatgatgatgctggtgatgagagttgcgatgatggtggtgacagttatgatgatgttgatgttaaggttattgatggtactgatgatggtgatgttagtgacaagagctgtgatgatagtggagatgttggtgatgacagtaacgagggtgatgagagttattatgagagggtaatgataatgttagtgatgatggcagtgataatggcgatgttggtaatgagagttatgatgatggggacaatgatgatgctcgtgatgatgggggtgagagctgtgatggtggtgatgatagtgatgagagttatgatgatggtaatgttggtggtgatggtggtgataatggtgatgtttgtgatggtggtggtgatgctggtaataatggtgacaatggtgatggtggtgatgagagttgagatgaggaagacaatagtgatgatggtgattgtgttcacaaaaacaaaatgtaatgccctggatccagccttctgagagtgacatataaaacagtgagcatgctttggagacatcagcactccttccacctcatacccaagaacttctccccaccccataccaacccaggcctccaatcacaccttctcctccaagttaccccaaatccctgatccaagctccagacccctcagccttcccatctcctccagccccttccttgcaggtgccactctatgctgagccgatgtgtgtcacctccctctctgcagcctcagctgctctcccctggccacctccccagcctgttctttccctggactcactcctacacccaggaaaggagagcacacacagtcaccatagctatttatacctggaacacttcatgttttcctgcctcggcctccttccattcagcaccaccctgcatccagctttctaatacaggacagccagagctcttcctgctgcccacaccctagctcttccttgacttctgcagcaagaccactatgggatgtaagagggttgctcacaaggtagaaccaaacccaattctcagcctcaatttccccaacatgggaatgatcccttaggctctggagactatgagaagagtttcctagcatgcatagatggagggtcagtggcttccaacctctgatgacacccttcccttccacagcaggctggagccagaggagtgcagctgtaagatgggcagtgttctctgtgtcatggggcaaccagtgcttcttcccattgccctctctttagcacagagaaaggatcaggaccagtcaggggattagaagggattaagagcaggagggaaacagagctgtcggacagaactaaaggctgaagttcggagctccagtgtccttatccttgtaatgcctcccatctgttgtacctcagtctcccttttgtagaaggcatagcctctgaaagatgcagaagcctattgaatggcctcagtgcacaaggggacagcggctggcagcctcctactgccctggcctcccctgcaccacctcccccatccatggctgcatctttgacaaggaccgctagggaatcaatcactctcagcagagccaggccccggcccctgacattccaattaaatgcttcactctgaccttggttgcatcatctcagcttggaataacatcatctatcttctgtagatggacaaagcctatgaaccaggcagcggaaactagcagccaccagtcctcagagccgcctcatcaccacagggacacatttcaatcaaaaggaactgcagcagcagcattctcaggtagaaaagccatcatccttcccagggacaagcattcatctctgctggaggaacgaaacagcctgagtccctgccaaggggagccccatgtttatcctgctgtctttcccattagtcggctgtcagcattcggttgggaactctggagtcccaggtggtgatcgctgggaaaagggagaccaaggacagggctgatggaacctggttagagctgggagacagccccccgcagggagtgcccttgcctgatggagtacatccagcccttccctgaggcagcccacacacttagaggggagaagatgcctctacagtggagcttcttccagactgataggaagaagaccctcctctctgatgaggagacacagcccttcctggcgagagcccagtctgagagacacagagaagacatggcccctccctggctgcagagacacagcacttgctttgtaatactccatctgaaggggagtatcacaaggcctctgctgcatcatgggtatccccctgcattccccccgatggaagacctcgggaagctgagcccctcaatgcagggattcctagaggaatgtttgtaatctctgatgtcagacaggcctgacctgggttccaactctaactctatgttttcctccctgtgtgtccttgaaccagtgactcaacctctctgagcctcctctctttaccaagaaagtgggaaccaccttgagaaggaactgaggtcatgtatatgaaacacagaacgtctgacacactgagaccctcagtggaagacagtggactctgggcgtgtccaactcaagggacagggaaagggagcaacccaggtcccacacggtaagaaccgagtcagcatcggggaccaggagtggggcccccaatctgccacacccctctttggaccaccagaaggcagcacagaggtcagatgcccaggaagcatactgaagacaacctggcgacctagattgtaggggcaggggccaggactcacccccaagacaactccaggtttaaaaattagaatctattatcccagaagcaacagaagaggttccttgaacgcccccacctccgaagagctgcttctgagctggcactgtttcctatggggttatttttagtttgttttcccagtaattattcttttgggtggatttcagggttgtagctgggtgctctctgggagatgggcgcggtatccatacaaaaaaaaaaagagggttgttattcatagtaattcaactggatttgtaaagttgttattaagcatttgtcgccacaaaagtcactttgatttggctttccttggagccgttctttctgcccaattttgcttccttgtcttacaagggaggcctagagtatttaagaggcctatccagaacacacagaaagaaacagagatgactcttcgcaggaagagaaaacaaatcctctgaggcttgcatctcagaggaagaacatgatgtggataacaatgatagcaaacgtgcacagagcacttaccacgagccagtcactgctccaaagtgctttgcaactttacaaggtaggtgctattaatatctccattttacagatgaggaataggcacagaaaggttaagtaagttgtccaatgtcacatagttagtagatagccaagttggtatttgaactcaggcagcctggctctggaacttggcttcagaaccacccaatgacagctcctggtgaccatctgagagtatctgagagacagatggtgagatggaaacgaggacagggcccccgtgagaccagggttaatttttgtgttctgttctgcaagcctagaacattacttcacttggcctggggagggaagggggatttccaagtgaggaaaacactctgcaggtacccccagaatccccttgaggatcccctgctgatggatgttgatgcggacacaagaattcccaggaagatcagcctcagagggcatttataatcagatgtgctgtgagctggtgaattaaacacaggctttaaaaacaaatagacttgagatcaaatcccagctctgccagtttctagctacataaccttgaacaagtgactttccctctcggaggttcagtcagcttcctctctaagtgtagataatatttacacaccactcaagatgatagagaagcttcaaagaggctttggatagaaagtaactgagagtgcagggctgtggtatctgaactactgcctcttttgccatacattcgtttgttcagtaaatgtctaggaacatttaccccatgtgtgccgctgtgttcaatgttatggaagatttaaagatgaacaaaatgtaatctgtgtccctctattaatcaattattgcattgctataaagaagtacctgaggtaatttataaagaaaagaggtttaattggcttctggctctgcaggctacacaggaagcatggcactgccatctgcttctggtgagggcctcagaaagcttccaatcatggaggaaggcaaaagggaggggctggcatcacatggtgagagcatgagcaagagagagaagtgggaggtgccacactcttaaacaatcagatctcatgtaactcagatctcgcaagaactcactcatgatctcaaagacagcaacaagctattcatgagggatccaccccccatgacccctcccaccaggccccacctccaacactggggattatatttcaacatgagatttgaggggacaaacatccaaaccacattagtccctacagattttatacgtgaatgagaggaaggctaaacaaagatcagatggattctaacaatgaggcagacagtgattgattccacctggggtggatgaaagagcctttacagaagggccccaagaagagatggggaaggaggaacaggcattccagcagagcaaaagggaaccacggcagagaaaggcatgactttttggggaagaatggctaaaagtggggagggtgggctggaaaatatgtgtcaaaccctaaatgtaaatctggggaatttgggattaatcctgtgggcattgtggagccatagacgggtttttagcaagaggaagacgtaagtgagctgagaatcagatttgggaggtagggtgggaacctaaagcaggattcccatcttaaaggatctggaaagagaacctgggttttgatctcaactctgaaatgggctcctgtgtgaaatcaggcaagatacccactgctgtgggcctcacattccccctgtaatgctcacaggttaccaggatggcctctaatggcccatctggccatatgtctatgatgtgagggcttcccctcttcagagtagacccggcttcctctgcagtcctcagcatgcctggctccttctctcaccctcccagcaggcccaattggccctcctgcccagttcaggaatcctgggcactgccaaccccaggagccaggcagagctggctcaacaactctgggaggtcacgggcagctgatcaggaggccatggagagaagttgggcccccggctcttcctctcccacttgtacctggcagccaagttggccaacaaacaagaagttgaggagcttgtaaccacatcagagttcgctgccgtttggctgctgggctgtggcaaagaaagtgtccttgctctcttcgtctctgtatttccgtctctggctcttgctctcttcgtctctgtatttccgtctctggctcttgctctctttctctggctcgcattaggcaagtgctttgccctggaattaaatgaagctgtatgggggtggggaggaaaagagagggaggggacagcggagcccagcctgcatggctcaagtccaaatcctcccttggctgggtgcccagggtggtcctagcttactgtccacgtgggccagagggaggaagagaaaggggacagctagagtcagggctggccacggggtgggggatggaggaagtgtgatgcctgaagaggaactaaaggtagagattctagggaaatgggagtaaaaagatctgtaagcagccagtacagaaggtaacccattttgcagagagttgagctgcccaaataatgttgggcattaatgtggggtcggggtcagggactgtgcacaaatgtgtggggtcggggttagggactgtgcacaaacacactgataaaatgtttcataagcctcccagtgtctttggccccaaacgtgtgaagtcgtataactgagtatagtaaccacgagcgtgcatgtcaccacagacaggtatctttgggcacagaggcgatgggcctgcttcctctccagcccctttcctagctttgccccagctctcaaatgccccagccatgcagaaacactcactgtctcctgatcacaccatgtcctccctgaatccaggctttaaaatgttattttctgttcttgaagcagcctcctcccctccctttcttctccccacttccccaaaccagcttgtccttcccttagtgtagctcaaagtcacctccttcaagaagctttctcatatcctgcagcactcatgtcctaggctgaactagatgcccctcgttcctgccccagggctcctgtgcttccttccagggcagcacccactgccactgtgcatcataatcctatgtgtctgcccacttccctctcccacacaatggcaaactccttgagggcagaggccatctcattcatctagcatagctccaaacacacagtaggtgattaataattcacttagtcaatagccattaactgaatactcaacagacatcaggcaaggggcacataacaagggtcaacgcagatagtgcctgccttcctgggtctcccctttatgggaggagacaggcaaatcaaggcgatctgaaagctgcttagatgtgggagacgcacggccctgcaggtgaactgaatagggatgggggtgtgggcagtgtcagggaaggtttcaaagaggaagaaatgtccaaggtgaggctgaatgactggatgagtacataaatgcaactgctagaactggagtccaaggtctgggtcagtctagcatccacactgcatcagggataaatccctgaaataattatccaaggagcctcattctctctaggaaagaaaagatgggtttccatgtctgaggcagggctgagccaggcagtgaaagtttgggaatgggcacaccgtgcggcagggagccaggcatatccttacatggggttatattcctgtctgtgccagtaactggctgtgtggacttggacctgtcactagctctctctgggccttgggtttcttatctataaaaataggaagggggtggattctgagcaataatcttaatgagaacatgaccccattgcaggggggatttactgtatagtgatgactaggcactcaaggtgcagagaaaaactaaacagaaggaaatgtggtcagaacttgaaccctgcctgattccaaaatctctgtttgttctttttttccatgaggccatataaccatttcacaatgtgtctgagaactttataaagaagacccctgagctgaaacgtgaagatgggcacgattttaattggtggggaaaaacacaaaggaagctgggtacagcaggaacaaaggtggggagggaagaatgagcctggcatgaagaggagcatccctcgtgatggtggcggcagggagttcggcttggcctggctggggcagaggagtcatgttggggaatggtaggagatgcagatgtctctgtccttcaggacttggtggtgggaagtggtgggaggaatcagggctctggggtcccagcccaagccctaccagtcaggatgaggctgacatggcaggtggaggaactccagcctccacaaggaaaagggcatagtaagagttgggactgccaagagaagcatcaggggcatgggctgtgggctcccaggctctggaagatcatggaagtgaggtgccaggcagggcccttatgggaacacagacccaagacccaattatcgggactgggtaaaatcaaagacccagttactgaagtaagtgaatatggataaataatccagtcagtttattttgttaagcacatatgccaggcaccattctgggcactggggatacgttggtgaatggttcatacagaatcttggcccttggggagcttacattctatcagaagagacagatagatacacaggcaattctaaaataaaataccaactgctatgaatccaattaaagtagcataaaagaataaagcaatggaggtagaacaatagttgcattattttatatcagctcatcatatatctcggaaggtatctctgaggaagtggcagttgggcaaaaacctgaatgaagtaaaggagcaaggggttaggggaaaacattccaggtggagggaacaacaggtacaaaggccctgaggcaggaatgtgcttgatatatgactgctgggcggcctttgtggtgccagtgtaataaaatagaagggagaagggggaagggggaagaaatgaatttggaaaagcagctaggggtcaaatcacataggcccatagacctcagtgagcagtttggtttcaataatagcaatggttaacctttacagagcatgcagtggtgctcagtactgtcaggtaatcagtatgcatttactagtattttaaaagtgcctgcttgggggagttgatatgattatctccattcaacagatgaagaaactgagactcagagaggtgcagtggtttaaaagaagatggctgtagagtgagtgatggggccagaatgttagggtgtccatatgttccagtttgccctaaatggtccatttaagactgctgctccaaagtaatttttagcccatttatgcctagtgttccattattggaatgctaagcatgtgggaattatttatatcctaccgctccaggtcattgccaagatctgattgcaaaacttcaaaaaattgcaacctcaggcataaatgggttaacagaacccctttttactctcaaatatatcttctacctccaaaattcatacgttgaagttccaaccccaagtaactcagcatacaacaatctttggagctaacgtctttaaagaggtgagtaagttaaaatgaaccattttcatggggcccaaatccaatatgactagcgtccttataagaagaggaagataaaccatgattcatgaacacagaaaaatgaccgtatgtgaaaacatagcaagaaggtgtccatcttctagctaaggaaagagtcctaaggggaaaccaaccctgccagcacgctgatcttggactccagcctccagaacggtgagaaaaaaaaacttctgtcgtttaagccatttggtctgtagtattttgtcacagcagcatgagcaaactaatacagttgccttgccttctaggactggaacccaggtctctgcttgggaaagccacatgctggccatcatgctgcccttcactgctgacattctcctgtcccacaaatagctattggtgctggaatctaagctgggagctcagcctacaggggaaggcaaagcagcccagctgcagggtgaaagttcgacaattgctacaatagccacgtgtatgcataactgtgtactaaatggggtgaatgtctaacagcatgtaggtgtgaatctgggtgctggggaaggggaacaagaggctgagctactcagaacagtactgcagaaagaacactactttctcatcagaggtgcctgtgttcccagagcccctgtgctggcctccttcacacactgccctccccgtgttgaacagcctatttatgcctggtaccccactgcccctaaacatgtccacccagaaatgatagctttgctatatatgaaatcctgggcccttgcatatcacagtgaaagtggctaaatgggttacgtatctgagctttggaatcacatatatgtgcttttgagctgtgactctgctactttatagctctatgaccctaggcaagaaacttgccttcactgagcctcagttttctcatctggaaaatggttataataacagtacctacgtaacagcgttgtagtgaggactcagataatgcatgcaaaatgctgggcacagtgactggcacgtaaaaagcatggattcattaacattagtcattaatattactaggttctctatatgggttggtgaaagctcttgaacttctgccatctgggcctttctgtcttgttcaacctatgcattccagtacagaagcattccataatacttcacacacaattagagctcaataaaaatttcaaaggatttcataaaatgactgaattaacaggcctccgtttttgcagctgtaaaatgagagggctagcttaggaaatctcggaacccccttgagctgagacagagtcggattccaggatgatcccaggaacatgtcttcatgatgctccacattggctcatctgattgtctcctgatggtagacattctgaaaaacagaggcatgctgaaggacagatgtcacctggcctatcatgagggcaggtcaggcatgggaggaagtgggtgccagtttatgtatgggtccttgataagcatccatgtagggcaccggggcctgggacagaaccccacttgctgcctggcttcttggcaggaggacagggttcttccaggcatcacctgggaactggtgactgagataacctccaaccattgccaatcctctgtccagaagacacaaacagaatggaaacagcagagacactaccaccttaagttgataaggtgctcatctgggatagaagagtacacacatgccaggtcctctctccagcccgggctccagttggggtggctcctctgacttccccttatctaagctccagtggcattgctgtttgggaatccgtaactaggactaacaggtgagaccgagggcagtctgctggggtagtaggaaaggcagagggaatgtatagaacccctttccaggtaaatgacatgcaggattggaatagctgaaacaactggctgtctaccttgtgccaactgccttctctctgagcagtaggatttacactgctgagaatgacaggtccatggagcactgcaggttgtagtcatattttattctccaggtgggctatcggctgcccttcacttccctgaggcaaggaggaggaaaatctggcatttggagagtcagaggatcatcaggcccatggacttggcacaaggcttcaatccaggaagggtagatccatatcggaggtacaggaagaacttgaggctgaaactgtgttctctaaagatagcaggctgctccctcgccctttccaaccacaggcctcagtcttctccataagatgagcgaagtgcatgatgccaaatcacaccacaattgcaagcaattagaagcttagtgtctgccttcccctctagaaagttagttccatgaggacaagagctggttttgtcctgctcactgttgtacctacaatgcctgtgatgttggagatatgcaccatactactgtgaaagggagggacagagacagggagggaggaggagaaactgaatcacaaaggaaggtcacataagagctatggggtggggtgagatggggttgcagagagaagaattctatgtctgagtccctgcccaccctgaccagaacactgtgctatttccacagatggctgggagagatgcaacattgctgcccctcagaccctagcgtcaactgggaacatttgaggagaaaggaaatttgatccacaacacagggtaaggtgtgtcttgggctcagaaaagcaccttgtctcttccttctggccatgctcaggctccatgacccttctgatggggtgctgggcagggatggagggccctccctgcttccttcctcctcttcctgaagccctcctctgcctcaggaggtggatctttccccctttctcccccacacagagcctgattgctagcttgcttctcagggggttggtgaataagcccttgggtgacattaattgccatcaggcattaggggcctaatgagaataatcttctttgacgactccagcaccttctatccccagggcctccaagagctggccagctctcctcaggctgcacctccccccagctccagacagatgtaggggtgggggaagggccagagcagccctctacaggccccagtaccaagcgaggcagcaacagccagcagccagggaggaggaagccttccatgaaaaatgcaagcacattttccaaaaacaaaatgtcaccgtcctagatgaaaggaaactctcagggtcaagagggctagcatggagtcaggcagatggagggcacggtttgagtgccccagctggctttgctctgacctggccccacactctcactccagttgagtgcagaggtatggaagggtgaccctcaagatccatatcctccccagtagggatatgtccatgggattgaagaccctgtccctccagagcagggtaggattgaaattcaccctctggggattggagttgatacccaacgaagctataaaatcattgccatggatccgatgcctggttgacagatgaggtgtgaaggttgacttgccgggtctgatctaggttgcactctaatggaaagggcctgatggtgggaacagatatcactccagccacccctcccgctagtcagcaggtgcctgggtgagtatgcaagaggggcagttccccacccccacctcatgcctctttaaaggcttgctaaacaacctgtaggaaagcactgtcccctcctcttctccgtcttccttccccagcaacagaataaataggtttcccacagctgcgccccggacccatcccgcacgaagctgagccccagagcccccgcggcccgagaggagctgggcacagcagcgaggctgattcccagccagtgcccagcgaactctgggggtgggggtagggtgccccctacccgcgcctctggaagagcggctgcaaaacacctccggcgcccggtggggagcgtgcatcctttgaaaagggacatcagtgactgcggtggcgtctaccctggagaaacgcagctgagggaggtggaggctcctcccgccgcagctggccggccccattcgggtcccagcgctagccggcgttgggaaggaaaaatcaaacataaaataggggcgagcggaatcgcgaggtcggcccttggcccgagtctcattaaggagccgcgcgcgccgccaggctaggaatgcggaatggacacgtggacagaggagggggagctaggagtcggggagtctccgtggcgcgcgagctgtgggccgcgcgctcgggggccacgtgaccacggggaatctgggaggggtgggagtgagcgcgccaagctcggcgcccgcttctgcccgggtgggcgctgaatcccggacggaggaggagggcgggcgagcgcgagtgtgtgtgtctctctcgagtcatttacggcggagcagccggcgcgagcgccgaggaggcggcgacggcggcggcggctgcttcgtgcaactgtggcttcccccacctcctcttcctttttgctcctcgattcttcttcttcccccacacacgtccatggggagccggctcccctgccagcacctcctctcctctcggccccgtaggcaccagctgccgcttccctggccgcaagctgcgcaggtgccggctgccctggcccctggcgccgcgcccgcgtctcaccgcccgcagcccggactggcgcggcgatccgctcgcccaaactgactcggagggagcgggagccgatgcccggcagcatcgagacagcgggcgaacgggcgtccggggacagggtgggggcggcggggaggaggcgtcggagactctgaaccccagaaaagttcaaggtttgtgcaggttcccccagggaaggcgaggagcgaggcggggcagcgcgcctctctgccgagacagcgagaccttagcggggtggcccggagctgccgtgagctgcaggagcccctctgcatcttacagcgtttatggtcatcaagctggagtcgacgtcctgggcaggaagggctcggggcagggcgcattagccggctttctcgctccctcgcttctccaagccccatctacatggggcagcccgttctggccgcgccacccttgccccagccgccgagcggctgcctgggcaggaggcgctgagccggcctgtgtggagcctgggccctgatccagactggagaaagcgcgctggagcggaggagcgagccttgcgaggggacaaacatctggccgcccgcctcgggcatccggtctgggcgtcgcctagggtggtggcgaccggcgtcgccagtttcagcaccgcacggaaacttttccttctccagatggattaaagttgtctggattttctctttctttgagaaagacagcattcatttgcacctgacctgggatttttatgctgggctgctgcaggggcttggaggaagaaagcggcgctatccatgtgcggttactaccgaaaccgaggaaactggggattgcgttggaagtcggcaccctcgagtgagttcggattcgagctgggccgtgaggccgggagattcagcactgggctctaggtagcccccgggacgcccgcggccaccgggctccggactgcacgtgcagctccccccgcgcctcgcagatcctgcagggggcaccagctgggggaggtggaggctcctcccgcccggagctgcgcccccaccggctccgagggtgtagccgccagcgcctgggacgccccctccccgcaaagtgtccccgaattgcactctctggtcccggagctgcatctgagacagccgggcgccacggcagccctgagttggatgtgaccaagcccagcctggggccaagtcgtcgtcgactgttgctctctcggacccctcccgcccccgcctcggccatggccccggggatgtcgggccgcggcggcgccgccctgctctgcctctcagcgctactcgcccacggtaagtgtcgcggcgcggactgggggtgaggatgcggcaggcgccactggagggggtacggggaagactggggagaggagcacccacaccccctggactcgcagccgccactccgggtttggcgtctctggctgcagctcgagttaccgccagcccccgagccctccggcgagctcagctgaggggaccgagcccggcgccagaaaagggtggggggagggtgtcgctccagtcctctcctggttataaagaagggttcgaacccgaaggtctggggtcgtgtccgcccacggaaatctagagggatccgagggatcctccggatcgcgtccaggccgccccccgcccccgtctctccctgcagccggccgggctgggggctgttgggatccgccgggatcgcgtctttcctcgccccgggcgcgcaggccggtgcggggccgcgccgcccgtcgcctcgcttcctgcggcggtcctcgggaagggaagtggactgactccgggccggggagccgccgcggctcgcacgcccgcggtcctgtgagctgcatctaaatggccggcttaggcgagcccggagggcgggggtctgggcacccgcacaggccggggcggtgggccgcgggccgcgcgcggagggagcgggctccgcgctctcgcattctgcaatctgttgcgtctgctccccaggctcgccccgggctccgcggtaaagggggtgggagaaggagggattgaggttggcgcgctttggcggtgggacagcgggcatacgggtggggggcagcgggtttttgaacagcccccaagaatgggaaatcagaccagagggaaggaggctgcagcgggccttccgcaagctggagacgctccaggaggcgaggggagcagaccgaggtgggagggagagagctccgaaaggagagtggagaagcggggccctctgctccctcctaacgtgaaaccagccgacctgggatacattttcttaaccagcaaggcgtggcggggttggggggcgggggtgtttcgatgctccacgctgaggggtgagcctcaggcagaatggagggcgcttagatggagggggcagtgggctctccgcattggtggagcgccctcggtgtgccgggctcagctcttgcccagatctgcccagtccctaagagcctgctcaagctcgccaggagtgtgcccaaggtctctaaccagcggcctctttcaccctgaccaaagcgcattctcaaggttgagagaataagaaaaagaggggctctcggaatcgtagggtcctggggctaggaggggggcggggagcaggcagacctccctctatgggtggcttggttattcccggctgaggtaacaccagggggggttgttttgcgttcagttcaccagagacagctaacctcagttctctatgggaggaataggcagagcagcgagccagcaggggggcgagggtgaggtggggcgaagtgggagcatagcggggaaccagaaatctctaggctctgtgtgcaacactgagaatgaaggtgggggagagggaggtgggctgcctgtctgcgcactggagctgcatgggctgcacttgtgacctagcactggccggcagggagtttccctgcccagtaggaggaagcccagaaacccaggcctgagtctaggtgggttcttcccctcttcttacatcttgctgtcggagttcccttcccaaagcccaaccatggcgtcacctcaaacgctgatgatgggcagctcaaactctgtcattagggtccctctgcccaccttcccgatccctgagcctggaattaaagatccctttcccttcctcacctgccagaatcctgcctgttcctaagacgcagttccagctgggccttagcgtcctggctgccttcccttggtcttggccttggcctccttttttccttaggcaccagtgccctctctgtgccccagtagtcctggattggtggaggcagagccatgggcttattccctgtctctccacacagccagtgcctaacacagtgacagcacacctagggcagagggcttggctgcctgagcagaaagaaggtatttgaggaggtagggtctgaatcgccctactgagcggacatttcccctcctgactatctggcttcctttccaacctccttccctgagtcctgaactctcttctccatcgcatgtctcagtctcccctgcctcagagaagggtgccagcagatacttaaaacttgggggatcccccagatgggtaaggccagtatgatagaaatccccccacaataaaaccccatcttgcctgggctgccctcctcctccagggctgcctgacacccacgtagccaccccttccctctgttaagaatagggtccggggacttagtctccctttaaactgactcttggttggggttccggggcttttctaaaatgctgggagatagagggacagttgcagttttctgtgcctggcaggcaattgaggtcacagggttctgaccacacagccagactgggagccaagtagcctgggtttcagtctgactctggcgccaccgggcagggtgaccttgggctgcctccctcacattccccatcttccacaggcagcgtggtctctggcctttctttcccctttccagtttctgccaggactcctggacagagaccatgtgtgaatggagccttactaccttttcagggcccagttcagcccatgagataggcagagtggtgtgtttgggcacctctacactgttcccagtctccagccctcttccagggaacatctgtgaaggccactttcttgtatctaatatttggggagactcccagccccactgttagtttgaataggagtttaggggtcagcgtggtggataaatctgttagagggctgattatgtcagctcactactcaggaacaattactggttccccacagcctctaggatcaagggcacactcattgccctggcatccaaagccatttatgatcttgtccaaatccacatctttacttcaaagatactggcctctcgccatcctccgtgtgccctatgaggtattgcttttctcactttcctgcctttctgcttttgcacccaccagcccctccatctggaatactttgcctccagaaattcttacttaaccttcaaagcggagttcaaatgtcacctcctccagggagcctccgtagattaccccctagcttctcaccagcagtccccataccctgatagaaataaatgaactttttccatgacttctttggtacttcatgctacttttctagcactttttcctcataggctgctgtgtgaggggtatacatgggcatgcttacctgtgcaatcctcctgatccccacgttcttgcatttagggcaggagccatgtcttctatgtgtttgcatggctctccagtgtttgacacatagcaggtgctcagaagaaatggatggggtaggaggacaactctgtattgagggaccctcccagcatcagttgaaaagggagctctggggtagagggcagaagaggggcaggggaggagacaggcagagataccacaaagagagcaagaggatggagcaggcccatgccatgccccttgagtgggcacatacaagacccatgtgtctccggtgacatgttatgacatggtctcacaggatacaaatgtagtgtccagggtcattctgaatacatggtctcaaaacgtgtcctcacctccatgatccccagcccagcaaccttgagtttctcctgcgggttgtgtccacacccctaccccatcccccgatcacccaagccctgagcccttttggagatgcaggaggaacacagcaggacagggtaagcaccagcccttgggagacccctttattgccgggcgtgagggatgatgcttgcttcgcctctcccacacccatctttcttctggccacatgcagccgtattcacaacatagccttgttaatgtttaagaccagtaggtggggatgtgttataaacttggtggcaggaaatgagctttattggaatccattctgaggacggctggtgcttcgctgtgggagataaggccactgtggaataccagagctggacttgggtgtctcctaggcccttgccgggggcctgtctggaactgacagaccctggacttgagattggtagtgagtgctggcgatgctgcagaaactgaaaccctgagaggcaccaactcccaccactggggtctggcccacctacctggagcaggggagtgtgtagtagcgggcagggtctcaccttgttgccctgcacataatgatgtccaaaacactgaaagaggaaccaccaaatccaacctcatgtggatgaggaaatggacacacagggaagggactggccaagctcactctgcaagtttgttctggaatcagaacaagcaccagagcccaaatggggctgtctgccccagactcctcaacagattccatcacctctactatcccctctctctgcagcttcttccagtgatgggcttctagcctcaagccagcctctggttgcaagcagtcatgataatcaattactagtagcattcattaataaaccttaccaagtgctatgaaagaaatgtgagggattccagacctgacctccagctctttcagtagctcaaagtccaactggggggaatgagacaaaggtccaaagtcttgaaattcaaagcagtttgaaatcacacagtcctcaggatacaggatatctgggttcaaaccctgactttgtcatcagtttgctgtgtagccacaggaatttcacctacttctctgggtcttgttttcttgctctcccaaatgtgagggggcggtgccctccaagccccctcccaactcttttgttctatgatgaagaagccccttcttacctccctcatctttctctgtcagagcacacgcctctctccccaagcacacgcctctctcccctgattcctgcagccgatgctaacaagtggaagaatcgtattcttcctccccgtttcctccccagggtcttccttacttcttccttgcccatgctcaacacagaattttaataagagattaatgaaccagttgtgtgtgtgtgtgtgtgtgtttttaggaacataaatttctttaaaatttttccttctctgtcttcttaaatgaaaagaaaagtaggccttcttatcaccaattcagctggctctgccatactccagcagtccccaaggatgggacagtgtatcacagagcaccaacactcagctagctactgcacgggtctctgggggacaaatgcactgcccagagaaaggggggactgagacaagtgagccaatgttgcaacaagtggggggggacaagcaagccattagagtggtctcagcacccacagtccgagtccaggcatcattatctcctttctgctgtgtcatttgaccctttcagctccccaccaccaccacttcccacccactctctgccatacacacttccatcccaggccctgctggctagcagacaacccagcaagatgaagtggaaaatggaagcagttacctagataattcaatgcttgttgcacgaatgaatgagtgcaaggatgaataattcaatgcaaaaaaaaaaagggaagtagaaaagataattgaagaaaatctctttttgcctaaattatctaggacattacctgccctcaaaaagttctgctttttatcaaactgtaatccttcctgctgcattctcacccacactttttttggcctgtgagaatgagcagctggttattctcttctcttacatgactttttttgttcagttcaaactgacggcagtgggcaggatgtgtgcttgctggcagaacttctcagattttctgtttccctgggcctatctttcacgaccactggagctggagaatgaggttaccaggatggataggatgactcctaaaatggtccaggttctcagcagcatctccatccaagaattcccagaactgaacatcagaccccacggggccctggccctgagagaacaggcagctaggataccccaccttactcctaaacccctccccaggaacacagccctggagctggccaacccttaaacagaattagtcacagtcacagagcggcaacctctctctttttctgaagaagaaaagctgtggcagtgggggggaatggttcttgcacttggggagcacccagtataacaagggaggcaaatttccatcttcagagaggccccaataagatgagggaggcacagctccagatctcaggggtagcctttattccttgcgtggtgagggtctgatagtgactgatgaccactttgcccagagactgaggaccccacaaccttctcagcccctcctggtctctccttccctacctcagcccccagggttttgggggagcctggctctggtccagaagccagtgtatttttagtagcttggtacaggtgatgcagcggccttgtcatggtggaagaatggtgttggtgggaggtaggagcacaggtgcacactcatgtgcacacccactcagtcacggccacacactgctaagcttgagcattctaactcttctgcagttcagatccatgatggctttgtttgtcacattggctgctatgtgaaggcagcactgtgatcccctttttatgcaaggcaaagctgaggctcaacagagtcctggctgcactggcttttgaagtcatgaccctgccttcggaggtcttcttgccatacctctctgtctcctgccaacagaatcagcacagatgcaggcagccagccatgcgggcccttatacctgagtgagtcctgccgggtgctgtcagggcccactgaccctccagtttcctctgagcctttctcttcccttgccctccatgcttctttcagtccctcgaataagtcatgctcttttgcatgtcacagtctttgtgcatgctgttccctctgaccagaacactcacactcttccactccattgcctactcagctgtcagggcagagcatatccaccacttcttcctggaagcccatccctattctaagaacaaggacccactacccactgcaactcattgcagatttgccgtggttttaattctgcattgcctggcttcctgctggccaaaagctcaaatagacctggaacgtgtgtgatcttttctctgcctctgtattcccagagtctgtctgggaggtgatgtctggaataaactaggcaactgatgacttgtcaaatgaatcaatgaatgaatcattgtgcacatacaggcacacagagacgttgtcactcaacaagtattcagttagcgcttactacgtgccaagcactgttctaggcatttggttgtagtcagcgcacacaacaaaaatccctgcattcatggtgggtatgtttgtcagaggagggatgcacaatatacattcttatgtatattgtgggtggggaaggcagacagtaaataataaattcattgaataagtgaattatatatgttcaaaggcaacgagtggtttttgttgttttgctgttgtttttctgagacggagtctcactctgtcaccctggttgtcacccaggctggagtgcagtggtgccatctcggctcactgcaaccactgtctcctgggttcaagtgattctcctgcctcagcctcccgagtagctgagactgcaggtgtgcaccaccacacctggctaatttttgtgtttttggtagagatggggtttcaccatgttggccaggctggtctcgaactcctgacttcaggtgatccacccaccttggcctcccaaagtgctgggattacaggcaagtgctatttattttaaaggcagggaagcagggtgaggggaattgggaaatctgaggtgggtgtgtatgtcaggggagggatgcgtagcattaataccaatgatcagttgatagaatgtcctttggcaaagacgttaaggaggtaagagagaaactaagtgaatatctgagagccttcggggtggagggaccagtcaggataagagccctaggaggagtgggcttgaccattcaaagaacagcaaggaggccagcggggcagagcacctggacggaccaggagggaggggaaagggccaggggcgcccttgtagtcacagtgactggcaggctgagggaaatagggagctgtcatgatggaggccacatgccggctgttctcatctgcccagggcatatgggatgctaagcaaccttcagtgtatttcacagatttggattttcttactaattacctgcctttacaaaaaatcagttcaggggcagggattacatgcacttgtttggcctgtctgatcttacaccactctgatttggggagtgcaatagtggcaggtgtgggggtccttgtgttcagggactgcaaagtcaacttcttctgagtccctgagcaccccgcaaaggccctgggttacctgttgctctgaccttactgcctgttgccgttctatgtctgcaaatgccttagttggtagtccctccacccacaaccggagccctgccaccgcatgacggctgcagcccaccctcctagccaaggaggtgacctgccccaggatgaccacattgtcccctgccctgtctctactggagagaggctggcttatggggtcttttttccaaaagcaaggaactattggattggaaataggaaaaatggccattttctcagctgccaacacagcagagaaatgatctcaattttctatggctgtactcggcaggataaaaactgccatcagccagccccatgcatgagaggtctgaaatgctgtgggaggtggtggggtgagaggcaagggtactggcatggtgcagagggctgggctccatcctggggcattgccagccctcctgcctgggaagttcgcccccacctccagccaccactgaccacacacctgtgtctgagcagttattgaactagctagttatttcaatggtcacttatgaaatgagcacctgctatgagccacatcctgtgctggacaccaggaatcctcccccccggagctggctatggactctattctcttggcttggtcccgacactcatagctttcctcctccactctcaccctttccctacactcagctctaaaaccaacctgtctgctgtcctcacttccacatctgcacagattgtaataaaatgcggagtcattgacatgttgcaaaggatacagagcattgtggaggaagagggagaaatgtcataactgttagagggatctggggaggcttcatggaagaagtgccactttaggagcccttgactaagttcaagaattctgcttctgaagactaatcagccagcatctactgtttgtctgataccctggataagataaaaacacagggcaaaaatggtcactggccagcgaactctcagagtcttggtgggagagagccaaaatgcctgtgaagaaatagcaagatacaatgctaaattcagggtatgtaattggtaactctttacctgggtgatctttaaagactttggcccaatgttccatgaagtgctggggaggtgtagagagttatggagtgagggagtgacatcatcaaagcagggttctcaataattacttgatcagggaacaattggcagattggatcaatgctgaagcaagtgttggcagcatctgatctgggagtgggggccttgggatgggaaatgagcaccagaagtcatctgaggcgccaccccatgacaaagagctcaccgttagaaccagagggatacatctgagtgtgagtgctgactctgccgcttaccagcagcctgacttaggtttccactccttggtttccacctctgtaagactggatggcaaattgaaggtgaggagcccacagcacgagggctcagtacgtggaagtgtctttattattttagcagccaactcctggagagcagaagggacatgcctgtgacttcacagccagttctgaccccttggtgtacaggagcatccttacggtccagtcaggagttctgaagaatatggccaagtaggagaacctagagagagatgggatctccctcactatttttttttttttgaaagacaaagtcttgctctgtcacccaggctggagtgtagtagtatgatcacagctggctgcagactcaacttcctgggctcaaacaatcctcccacctccacatccccaagtagctgggactacaggcacatgccatcatacctggctaacttttaagtttttctctccctggggtcttgcaaatacattgttgcccagtctggcctcgaacttctagcctcaagtgattctctggccttggcctcccaaagtgttgggattataggcatgagccaccacatccaggcttcctcactatttttaatggagaaccagcctacctcctcattcctcatccaacagtcagccagcagctgaaggagcggatccacacaggtgtcactgtcagcatttgggccccaggaaggtcttaggaaccagtcatgtcagagaatcatggtgggtcttcaagtcacacaaatgtaggttgaaatggtgtgggctgcctgccctgctgcagtgtagctgagtgaccctggagcacttgctgacatctccctgagcctctcctcccctgtctgcactgggagtaatatcctctctcaggctgggctgccgcatgaatgagatcccacggtgtgtttggaagtatccagaacaaatgctacgtgcctgctggaggggctcggtaaactggtgtctttccatcctttcttgcctagagccaggccttactgctgggaagcatgtttaagacagtgccaaagacttcccggagagctgttttctggtggttgggttttttgttttgcttgggatttttgttttttaacccttgatgcctcttagcaacatgctgcttgttttaaaaacagcagtggccagctgctggcccccacccttcctccctccccactttccttcccaggaaagcagtcacaggcattgccccatgttcccagtgcttctgcagcccaaccggggtggaggaggcattcctgcgtccagcagccggcccccatcacaatgccaaagttgcacccagctggcaagcccactgcttcctgaaatttgcttcctccccatggtgggtataaagtctgtctacacactgccaggacagcactgccattgccagatagcaggtctagggttatagggagtttctgacaaggaacacaggcctccctaatctgcagcctgaaggtgtatggggagagatacaggcttgaaccctgaagatcctggagcaggagcctcctcatccactcctagcaggatggccaggtaaccatacgcatattactctttcgtttcagtttctttatgtgcaaacaataagaagaaaaacctactcatcttgcagggttgttgaggatggggccactgcagttatgcactccgcctgacactgtcagtgctcactcagtaaatggttgccataatcattatttcataatggtatcattggcatcaaggaacacttaggagtcacctcagacaaaccagacccacccagagggtcccccacctccccacattcccacctctggtgttgctctttccaccactgttctctcagccaactgcaagccctgtgataaacccttcctcccagtggaattttgttttcttgtctttgaaatagaggttgctgagcagcatcggcactgtccaatagaaatataacagcagccacgtatctcacttaatcttgtctatttatcacatgagaaaaagtgaaaagaaacaggtggaattaattttaatagtatgttttaaccaatatgcccaaacaattgtcatttcaacatgtaatcagggccaggcctggtggctcatatctgtaatcctagcactttgggaagctgaggccagagaatcccttgagaccaggagttcgagaccaccctgagcaacaaaataaaactccatctctacattaaaaaaaaattatattgaaacaatcaaaaataaaaacgtgtaatcagtataaaagattatgaatgagatactttgttcttttcttttgtattaaatcttcaaaatcccctgtgcgttctgccttgccagcagcatatcttcatgccaactagccacatttcagttgctccacagccacatgtggtgagtggccacccaacaggacagtacagggctggatgctgcccacgggcttatccatacccagttctcctattggaggtattttcagggccccagagtcagtgctctgggactgataagctgagcccactcacctcctgctgtccttcttggaaatcccctgcccagctcagtgcctgctcagcccttcctcagctctggcatgatttgtgctgacgatgatgactcccatccattcagaggcagcagcttctagggccggggtaggcagcttccagctgcctcctaaggccactttcccttctgctctgccaggagatcctgcaaaccacaagtcaaatcatcacccttcttctcagaaccacctcactgagagtgagagccaaagtcctcacagtagctcataccaccagcatgatctgtcccttttcccgacactacttctttgacccaatcttccccttcacctgctcgtctccggtcacgctggcttcttttctgtccctgacatgccaggcacagagcctcaaggacttggctggcccttgctgcccctcgaataaacacgattcccgcctcttacctcctacctctttcaggtccctccctggtccccctctatctaaagcagccctgtgcactttcactctgtcccctgaccctgctctgtttcccttcacctgacatatgacatggttatgtgttccattggaatggaagcccttgagagcagaggccatctctgttttgttcactgctgtatccccaacccctggggcctggcacagaggagatgctcaataatgatctgcgggatgaatgaatgaacctgggagcctactccttcgcaactgctcaccctttccacccaaggagtcactagcaagacagactgggtggcatgattggcagtaaccagagaaagaaaatgtattccttcattcactcattaacacattcatctgccatatcccagctgtgtggtcttggaaatattgcttaaattctctgtggctccgtttccacgtttataaaatgggataataagagtgcctttctcatagagttgctgtaatgaataaatgagttaatgcatgtaaagtgcttggagcagcgcctggcttgtaggaagtgctcaaatagacactcgctattgtttcattcagcacatgtttttttgtttgtttgttttgtattttagagacagggtcttgctctggcatgatcatagctcactgcagcctcgaactcttgggctcaagtgatcctcctgcctcagcctcctgagtagtagctgggactacaggtgcatgccaccatgcccagctaattggtttcttgaggttttatttttagagatggaattctaatgatgttatccaagctggtcttgagcttctggcttcaagtggtccgctcgccttagtttcccaaaatgctggggttacaggtgtgagcatgtttttgaacacctactgcacaccaagcactgtgacaaacaccaggcatgcagagatgaagacacagtggctggctgatatgagacaaggatgcaaataatttcagtgcagtgtcatcgatgccagggtgctggaggagcagggactggcctacccggactttggaaagggccaggtatggcttcctgtcattctgtaggaaccactgccaaaatctgtgtgaactgatgagttgagctccagcagcatcatggagtaacatttcgtccagagctttgcccattcagccactgcagtgtggtgaacagagcacagcctaggagttagggaacctcagctctgacagcaacctgataggggtcacttttgttccctaaacttcagtcttcttacctgtaaggtggtctatactgaacagtgcccacctcttagatcataagaattcaatgagctgatggatgtaaagtaccagcatgtgcctggatgctcaataaacaggacagatactctgattatcctcattattggtaccagccaatgggaagacctccttatagggtgccctgcatacagctggcactagatcagtgtgtgtggacctgcactgagagcctgtgtgtactctgaattcctctctggactgtggcacagagggcttcacaatgaggtgtgatccttaaagtcaaagaaacatgggacaagggctggcagggagattcaggcccctctcacctggaaccatttctgttttaaagatgggaaaaccaaagtccagagaggggaggagttataaagccagggttaagacccgtgtgcctgactcccaggccagtggtctccttcttgtgtcttctttggtttcacatgagggtattgacaggggcagcaacgccaacaattgctgaaggaagttggttggtcacagctgtgggtaacctcacctctggcttcttcagggactgtatttggggaggcgcctcagtaggcctggtatttacattgagtaaccagattccatctccaataatcacatcacaaacagcatgaaatgtgaactatggggaaggctttgctaaatgtgtgactggttttcttatttttccctccattcccctccctcggaccccaacccctctctccctctcacgtctctctgtcacacacacacacacacacacgcacaacttgcattccccaggcaaccagtgcaggcctctgattccagcccagtgaaggccatctttagaagagagatttcccctgtctggggtgtggcaagaggaattggtatttgaagatcaggttcttgttccttgcagttcaccactgttccccaccatgaccaaggagtgtggagcccttggcagtttaaaaatggctaaacatcttacaccatgtaagcctcatccatgaaattggcaatcatgattcccattatgtggatgcggaaactgaggcttagagtatggaagggactgccaggtcacagagacagaattagcagagcaggactctagctcaggagacggtgtcctctactccccctgggccctaatcctctaggcctccagcccctagtgtcatagaggatgtgtcacacccattcagcttggtcccagtgccatcaaatttacctatgcaggtgccccagtcacaaaaaagggaaactgaggcagggaatggctgactcattcctggcagttgcttttctcctcatgtgtcttagcccttggtccatcatttgcttccttttccttggtccctggctattcccaagggtctcccagccctgatgtgtgggacagaaccctgcaggtcctcctcagaatccagattttcctccacatctctgcaaagctgatcagcataaaaccatccctaggctttgcctttaaaagtcttcatcttttctcttctccctaaatggcccctaaatgatttctgtaaattgctctaagtagctcaaaaaaaaaaaaaaaaaaaaaaggaagaaagaaataataataactcagtgactgcctgcctgaccggaatctcgatggctctcctcctgcctggctgcacctcccagctccatcccaccgagcatccagacacgcagcccctctgctccaaagctaggaagggggagctatgcctcagcctgagccctgcctcctccctcaggcaggaggctgcccaagtcagggctgcagccaccgtatcagacagggagctcctcaggacagcagtatcctccccttcccttcccctaccaccaccagactggggagtttcccaggggagacctgcacttccctcatcagtctggggactcctccagaggagtccaagactgcttccttctcagactaggggcttccccagtagaggctgtgcctgccccaacagacgggattcccttggggcagggctccaggggcactcagaagcccctctgagtctagctttccttgttctgcatccagctcctttatagagcctcatttattttaccccaggttagaaatctaggtcctgattcctaggaaaaagatcttaggatctttttcattgattcagtcaactattcattcattcattcaattctgcaaaggtttcctgaacaccgactgtgtgccagacactgactggatatgtgtccttctgcagatgcggtccctttgaggaggtcctgtggccagagaccccaggcatgattcttcttggggcagggcatccagcccaaggctgacaccccatggaggtgaacccagcctcagctcctggccaccatcatgatcttcatgaccacagccttttttcagtgtgggccaggaagcagaggccaaaggtaggagggccccaccagctctggtgcttcccatgagcctctggcctggcccacctttccatccataacctccactcatgctctcctccacacttcctgcccatggagatctgccatctcctggtcactgggggctgagatcctgcccagagacctcaatcctagcagctcagcccctaaagtgatggtgtggccttgagcaagtcccttccctccctccaggcctcagtttccctgtttgagatgagacagaattggactaaatcaatgatttcctaaaacatttttagccagtaaattatatatgtaatagataatgcattacaatatgtcatatacattacatataatacatgtattatatataatgcatatatgatactggtaaaagcagaactactggttgaagagagagtggaggtacctccctaaggtctcatctgtcccaccttcccctgtcaccccatggaaggccttgagacacccccagagagcccagctggcaagttgttggtgaatttaatcccttcctaaggccacttccactgtgccatggggagaggggtctgggtggtgctattgagcccatcaggtgatgggacagtgagggagacatggcacagtgggggagacagtcccatcagagagtcccatcacctatctgccccctgattacctggggccccactctgctttctggtgggggtgaagcccaggagaaggattggctcttgctgggtacccagcaccctctaggactggaataagtccagcccctgattagaaatgcaggccccagggaagctcagcaggcagaggcggggcctacccaggacagccctgcccacccctgacagaaggcgggattgttccagatgagataaagcccctttgtcatcctccctgcactccctttgatgtgcagaaggtggaaggaggagaataaacacagacacagtcctctgcttcctctctgatgtaattggaacccaattaagtgaataattgttacaaatgttgaaattaccttccaccaacttggggatgtgagcctgctctcagcaggagcctctgagacccaggctgggacctggccctggcctagcaattttgggtttccctggggtggggaggtgttgaactacagcactcttgattgtcccgccagaagagatgctgagcgatccagtccagcccctggctgctgcagaccctggcccccagcctcagatattcattcagctaacctttacttacacttccagagcttacagacacttgctcataggagctgacctgagtccaggcggatgaaaataactagcactgttgaggcatagacaggggtcccaaggagaaacagagagggagggccccaactggagcagtgcaaaccttaggcaaaaccttgcaagatgggtgggagtgaggttcctggttctgtccagagtgggcatcttcagtagaaactgaggtggggggttccccacagcaagagggtatgtggagaatcagagcatggaagatgaatgactcagattaggatgcattctagaaacctgcataaggaacaccccaccacggggcacctgctaatgctgctcaacccccactgtctagccataagcgcagttgcaccatcatggggcgcatccagccctcaccttcagggctggtttatctgatggtggcctttgtgttggggcttttagggtataccaacctcattgatgacacttgcaaactgaatggctgatgccactgcttctgccagcagtgggtggaggggagagtagggggacagggcaggtgttaatttcgtaatgaatttggtggattcagatgcagggaaaggcaacacttttgtgaaaactagaactcaggcagtgcttctcaatcttggctgcacattgaagagttttttattttttatttttattttttattattatcattttttttattccagtacctgggtcctagccctagagattctgaattcactaatctgggcacagccagggatcccaggtgcttctaatgggaaatcaagcctgagcctcactcactgtcagagcaaggcttcccaagtgtggtggagggagtggggagggggccagaatcaccttctcagcacctagaccagaacttctgaattaggatggctgggagggtcccagggacctgcattttataaggccctccagcatcgtgacaggcctagggcagatcccctgatgctgggggccctggtggggaggggggcttggaggccctggggccagaggacaggaccccaggaaggaagaagaacatagaaaaagtgtggaagataggtatgtcctatttttaaatgatttgaaagggaacctttattcacttcctatcttcttttcttcctctcgttcacttagtcccctgttctaggacccagaatccaagataatactcttagaaccactctttagtctcattagacacatagtagatgctcaataaatattgactgaaggaattatgggtaaactctgtttggtgggctaacctggaaacgtaactactgataattgctactactactgaactgctactgataatatagtccctgtgtgggaaagtattgaaatgtgtttccaagctctaatagctaatttctaaagaacttttgataagcagcccgtttgttaagtttgagcgtatatgagtgtgtgtgtgtgtgtgtgtgtgtgtgtgtgtgtgtggcagggtggggaaagagagttctgctcttaatgaacccagcaggggatccacccttgggagtctgccctgaggtttgccatggggcacctggattgatattcccagtggggcatttatggagatggcaaagtagaacaaggtcggggtaggagggcctgagtgactgctaaggagagaagcagccaggagaagccaaagaaggctgacaggtctagggcaggagggccaggagttggagtgcggccccggcagaactggcagtccaggatggagctgtgaagtacccagagcagcagggcaccttgcacgtggcctttccgaggtgtgcaagagcaaccccagcaggtcaaaggtttcaagcaggaaagtgatggatgcacctgcagaggcagagctgtgagacagaggccatgaggtcatggaagcaggaggtcactggcagcctcaagcccctaggccctcgccagctcacggcacacactctctctccatgtttgctctgggagagaagaagggctggtctccactggggagcaggcagaatccaggaggccattgggctggacaaatggccttcctgccttctcacagtgtgaaatttgggcagcaacagccaacaagaatcccagggggtgcagttttcaggaggatttcaggagatctcaatttgattcttgccacatccccaacaccctccatgccagcattaatgaggaaatagacaaaaagctgaaagagagagaagcagagcgggtccagaggcctgggaagagcctgcccttctgtgagcctctggaaagcccaggaggcagaccgcatcttgtgggggtactacagtcagcctttcccagtgaatccctccctctccctggggcagccattgaactcagagtgaggggcttggaggagatcccccagtccctgactgccctgtcccaggctgggctgtctctactgaagccaggctgtcagctctgcagggaactccggcctctggctggaggctgtctttgtccccaaagtcccagccctactttgtactgatggaggactccagagagggggcaattcacaagggagacgaacctgatggccttgtgggagggggctgtccctgaccacacagggtgacagtgattaaatgcaccagcagctgggccatcagggccctccctgctgctaatttgggtcaattaagccaatttgtctttgttgacttgaagtctcttctctgtaatggctccagcccctctggggcttcagagggaagagaagaggaaggaggcagtctcctggctacagggctacctctcccttccccaccccaaaaccccaggcccgagtaccttcctcaaccttgtgacccctctcattgtcctgcccgagggcctccacagctgtcatccctgccgatgcctcagggttaatctcactccacagatgagcaattaggggtcctctagagagggtgctactccaagttagtgggagaggggggaccccagcatttggactcacagtctagtgctcctctccagtctccacaaggcactgggtccatggtctggccccttgggagtcctgctaccatggccccctgaggggttccagggaacaccatttaaaaaccacttcctcagcccattaggctccatctggtacccaaaaaatgggggaggcagggaccaaaaaatgttgtctccagagagagacagctgcctccgcatggcctcccagtctaggagaggacagagtctgaaatgaacaatcgtgctgctttaagctggctctcatgtcccactgccccctgggctggcccagcccgcaagagattgaggcagcagcatattgggcacaggtcagagacaaggctgacacaaggctctgtccattctgaggccccttcacttctctgggcctcagtttacccatctctgggatcccaggagctgaagaggaaggctgcagtaggcccctgcagctctcacatttggagagttggcctgacaggggccagggtggaggaggaggcttttctcccttctagcttagaagatggagtgcttcctctctgtctccattcttgacaggtgagagcaggtgggacatgttgtcacactggagactggcaaggacaggaagacccagagcttcagcatcccctgcaggaggctgcagctccaatttcatccccatggagtcaatctggcagagggagggcttcacccagggcagtggggtcaaaagggaaggagctgtggtttctggggaagagaacccgggagctgtacacagcaggattagtgtccacgaaggagagaattagctgagtttccctttcaaactccacaagatggcttccttaacccatctgtggccaggaccattggcgccaagggcagaagctggggaagcaggtccacgtgggatggaagtaagtggactgtcattgcaaagagagatgccagttgcctctccaagatcttcctggagatgctggtgtcaaacactagagccagctacatggggctaggaggtggcattgcctcccagggaggcacagaggctgtgtcctcccagcctaggcctgtcttacacaggaagggggtcatcttctggtgttaagtcacctgcattaagtccttttcgtggctgcatctaggctgacagaaagtgggatgggcaggggtcaggttgcgagacagtgatgcacagaggagaccctgacctcgtagccatcctcctgggggataaggcagtgtctgtatcagatgtgtgtaacctcagattcctccactgcaatgttagggcctctagggcaggagcctggagggtaacagacacagaccctcggacccccagaaggaacctgagggaagggctggctcaaccccctcttgttattactggtggggaaactgaggcgagatggctccccacagctagcaccctgtatagtcgtgttccacagaggctagagtatgactcccaggctcaactgagcactgttttcctagtcatacttcagaaacctccatgccattccagggactgcaggaagaggggctgtgtgccatgcctgctcctgcacagggatccagcaggcagaagacacagaggtgtcaggcagcgatgctgagtggacctgggtctggagcctcagaggccattccttccctgtgtgggctgtggcagggtcctcctctggccagctcttccccctgggtgttcctgtcctcccctccctaagccttgccttctcagcctcatggtggctcctctgcagtgcctgccaccctcagtgatatgcccttgtgggcctccatccctggccatctcagccatactcactgtcccagctgcagctgaccactcgtccaccatctcctgtggctattccatgagttcctcactgtgggtaccagccccctccgccaccaggcctggtcccttctttcatccccctccctcactcaatggagccaccctccctctacctagaagccacatcaggacaactgcacccctccctctactccctcctgccctggagcccccttggactgtgctgcttcagagtaacagcaaaagtaagcctcttcctgagtgctgggcattgttctaagggctttgtttaatcctcacaacaacagtacttgtactgtcttcacttcacaggctcagagaaggcagtaacatgtccaaggtcacacagcactgataacagtggggctgggaccaagtgcaggcagagtctgagctcttcagaatggcttcttaggaagggttcgctccttctttgctgctactgcctgttggggactccacatctctcccctggaccatgacagctgcattctgagcgctctccctagtcttggtctccccagcacaccatccgccaagagagcccttcccaaaatgaaaatctgaccatgtcaccggcatccatccacatttgatagcttccatctcccattgtctgtgtggaggatgagatccttccagctcctcatggcagcatccaaggcccctgtgatctgaacttgccttgcctgttctcctgtgtcatcacctgcgtctcatcctctccctccacacatgtgcgcaccctctgccccctcccccaactcagatgaccatctgcaggcttccagctctgcatctccactagttctctgtgggtctgtccccctcagaaaccaactttgacctctctgtgcccctcctggcacacagtaagtccttgagggagcaaagaaagggaaagaatgcattttgagggaagatgaagtccaaagtctaatgagaatgatttattattaatagcaacagctaatgtttatttctgagcatttctgtgccaggcacttgcatttcctcctcacgacagccccatgagctggatgttactgttgtcagcactttaaaggacaggtggctgaggctcagcaaggttaaacaactttctcaaggtcacacagctggaaagaggctggattgggattcaaagccaggtttatctgagcccaaaacttaagctggagacctctactttctgtaacccaccttccaaagctgtccagaatcactgggtgatcctggatggggcctgtgatttcgtaggctgcactgagagggatgtgcctgtcctccacttcctaaagagctgcctgtattttcttatgtaatcagccatgacgtcctaagtgagtggattcaggtcccttgtcacctactgtcgcacgggctgttggggccctcagagcatgaatcgtgtaataagtgaggctcagcccagcttcggaaccatgcggtgcttcaaagctgggcccggaaaggtatttccttttggaataaagtggtcaggtgtactcagcacctccctcagtgagtggggtcagccaggaggagtggccccttccaggctagcttctatggaaggccttccctcaccatccagaacaggccccactgagccagcctcccccaagtacccccagcatcacagcatcctgaccccaccctgctgtcctgcttgggctgaacacagacagggaagagccctgtggctctcctaagcaatagctttgcctacaggcggaggaagggctgaggttatccttcaaagccccccaccatcagcaccaggattccaagcatctaggaaagaagatttattcgctattgccacgataaagccacgtaacaaaccacccccaaatcccatggcttgaaacagtgagtgtttatttctcgtgagtcgaccagatgtctggggtttggttgctttaggctgggttcagctggttggactcccagctgctgatttggtcttggtctgttcatgcttctctccacctctttagaaccgacgctacttgagacgtattcttctcgtggcgaaaaggcccaattgtgcgagcatgtttccaacctctacatgcgtcccattcattaaaatctcatccactaaaccaagtcccatgactgagcctcaaatcaggaggtggagaagtagattccacctacaacaaagccatggcaggagtatggccgggtcatgctattccagagcaatgtgaagaactgggtctgggccgggagcagtggctcatgcctgtaatcctagcattttgggaggccaaggcgggtggatcacctcaggtcaggagttcgagaccagcctgaccaacctggtgaaaccccatctctactaaaaatacaaaaaaattagccaggcatggtggtgagcacctgtaatcccagctacttgagaggctgaggcaggagaatcgcttgaacccaggaggcagaggctgcagtgagccgagatcgcaccattgcactccagcctgggcaacaagagcgaaactccatctcaaaaaataaataaacaaaaataaaagattgagactgatagttcagtctactacacaggaagagagtagtccagaagtcagaactggaaagggcctgagaattcacaagcatagaaactgaggcccagggaggggaagagacttgtccaaaccacaaagcaagagctgggcagaactaggagatgcacacatgctcagagctctggatttgttctgccccacagctctacctccccttcgccctcacagacttcctggaagcccagtccctggacgagggctgtttagggagctatgagcccagtctcattctcagaccatggttcttacataggtcccctggcaagttggaggagctgggccacccggggctggggcagtgatgtgccattcctgaacccagaaccaccactaatgagcagagagacatggctgtttcagttttcccagctccaaccctgtgtgacctgcctggctgcacttcctctgcccgtaaaacagtacaagggccctcctctccccactcactcgctctctctctgctcctttcctggcctccttcctttcctcctccgccttccacacagcaggcagcagctccgaagaatggcaacctcccagaatctcacagctggaaaatcatgcagaccaaccagctgcttgtgcagaaggctctgcatggcatccctgatgggaatcaatcagcttcaggtggctgggatccttcctgggacagggagctcagtacgctacaaggcagctcctttcattacagctctgaccctgagaaattactaacccatttttggttccaagacagccttccccaaacttttatgcactgatcttagctctaccattatttagggagaacttactatgtaaaagctgcggaccggggatacagagatagggtcactgtgcacctcctcaaggggcccacagaccacaggggagacagacatggcaacatggtgccaggtgacacgtgctcaggcagagaaggatgggggaaccagggttgacttggggaggacccctattcttcctgcagcaacaaacaaatctcttcccaaaggaaaatcctgctcctcttttcacaatatttcagacaccaaatgtgcaggattttattcctcacaccaaggcaactctccagttctctgtgggcatgaaatgggtgtccacaattcaatttagttctgatattaactgcctggagttaacacagactccacaggttaaagactcagtcccacaagactgctacccatttcagatgccagttgcaagtattgagtgcccaggtaccacacttctgtctgactcggctacgacggggattcccaggaccccttcctcaagttcaataatttactgctatggctcaaagaactcaggaaaatcttttttttttttaactattaccagtttattattaaggatacaatgaatcatcagatggagaggtacatagggtgaggtctgaaagggtcccgagtgcaggagcttctgtccccctgaagttggggtgtaccactttcccagcacacggatatattgttcaccaacctgggagacctccaaaccccgtagtttaggtaggttttcaataaaggttccattatgtaggtgtgattgattcgatcattggccattgttgattggctcagtctccagctcttgtcccctccttggaggtcagggagtggggctgaaggtttcaaccttctaatcacaagctggttcccctggcaaccagctacaacctcctggagtcactccattagcataaactcaggtttagttgaaaagggcttatcatgaataacaaaaggtgctgttctcacccctatcactcagaaattctgagggttttaggagctctgtgtcaggaacagggatgaaaaccaaatatatatttcttattacgtcacaatgtcacacttccccaggacgctctgcagatgcattggtgctagtcagacctgagtttgagttccagatccatcatctactagcgatgatcttgcacatggctaagctgcagtgtcctgtatacagttgggaagacggatgcatattctcatgggagaatggaaggtagaatacataaaccactcggcacatgcaagaacccagtgaatggtgctgtggccgttattattgttcattatgcaacccaggatggaattagcacttagcatatctgtactcatgaaactaaaaccttgtccttccaagtgggactgtacacttaccccacgttggagtctgcaaagaactgttggggatatgactctgttatctgccttcttgtctcctcctctcagaaatcaggatggaggggcttggcagcaagacgcagccgtggaccattcaaaccacataagacctctttttcgcagagacaggggagcaggtggccttagcattgaagaagatatcaatatcatctgctcttttgtggcctcatagggaacctcaaaaatgtccagccgaataccccgtctgattattgtagtcagaaggctaaggacagtaaagctatgacatggaggcccctgtttcccatctagcactcgcagcagacagccttaatcagtcatggctctcttcttcctctgagtttggactcagatcctgagtcattcccatctcagattccttggcatgagagagaaaaaccttttaaccagcctggctctacagcagtcgggacagtcttcctggagaaggtgggatttcagaattttgtaaaatgggggtgaatcacattaagcagatgtgaggaaagcatgttttgagtatggagtctggggggtgtctgaagaaggtctgtgcccagttctgcatgtggcctggaagagaagcctccggctgccctgcctttcctgaaccttcctcgcagagcttgggtaaggcctcaggaagggtgtggaatgtgagaaaaaggatgagatggacggaagtgaagtgagatggggagaggtggggaggaagaggaacacaactgtgagcagatgaggtcatcaggtgaggggagtggcacctgcccctttacctcaggatgcctgagcagaaccagagcaggggagctctttcctccccaggacctgacagattgctgagataacttaagctggagaacttaattacagcacttgcctctcgccctatgcaccagccccatggaacggcagctctgtctgcctcccctgcctttgccctgctgtccaagtgtgtgtggtatgtgtggatgtggaggagacaaagacaagcaccaccttgtggtctcattcccctgctcaagaaccctaaaggctccctattgctcatgccgtgatgggcaaacttttacaagtataggatctattatttttgcaacagtctatgtgaaaaatcatgacaataaaagctgaccctgggacctgggactcctctgcagagccccagggctctaaggagtacagtttcaaaacccctgggataaaatccacagactccttagcttagcattcaaagccctttgttctcttggtgttaacctgccggtccagccccatctctttgctttccctcttccatgccactcaatccaaacctgcctttaatccctggaccccacttgccactctgttccctccatccctgaccccacccacccaggtcccaccacacccaatcagtcctcgagtttctacccattcttcaagatcttactactcaaatgactcctgcccctgaaagcctttcttttgtgggcatctggctctcagaatgctcagggagctctgcacttctccgaagcctagcagcacttcctaccttttagcatggttatttatgtacttgtctgatctccctgttagccggcaaattccttaagggcagaaactatcttctttatctctgtctccctggcagttcccagcagggtctggtgcagagaaggggctgaataaatatttatttgttgaatatctttactgggtgtcagttacaaatctagtattgtactaggcagtcaggctgcatggtgaaaggcgcggtctctgcccaaagcagggcctccatctaagagaaagtaaaacatgcaaaccgacagttgcaatgcagagaaaaaatacagaatgacagatgtgagcagaccagaatcctgcttaacccacccttgtgtagtggtcaaggaaggcttcaaagaggaggtgatgctgcgagaaaaaggacatgtgacactgatactggtgggctgagggaggtccccaaacaccggtgcaaagcagctggtgtcgaggctcttgacactgttgtgagaatgaattcaaggatgagtcaaataacagtgaaatcacagagatttattgcaaagggaaaagtacacactcaagaacagggagcgggagcatactcaagagaatcatgcaagtgggtcggggctgctacctttatggatttctttgactgaggggtggaatattaatgaaaactcctgaaaaagtcgtgatttcttggaactgtggtgctattcatttttataccaaatatggatgttctcagaactgtcatggcactggtggatgtgtgatttagtgtgttaatgagtggataatgaggtcctaggtgaaacctagatcaaatccagtgccatattgggtccagtcggtcttagccaacttgattcacaacctgtttttcagggtcttatcagcccatagcctctagtcatgtgaaactgctgcctggaattttttattcttgtctcaacacctaccaggtggaatgtgtgaggaacaacacagcagacagagggaacagcatgtgcaaaggcacagaggcagaaagagtatgactggagatgcccagacctgggggtgtgggttggggagtgggagaagggaactcaagagcaggcaggggtgggacaaaggaaacacttgtggaaaagttggattgggaagtaggaaggtaagcagccctaagagatgagaaatgagctaaaatgagacagaatggcagatgggagaggagggagctgtgagaccttgggtgggctttttctcctctctggaccttagtcttttctggaaaatgagtggtttgaactacagtcttgaaggcccctttccagcactgagttagaagtgctgatgaagcagcagccagacaactgtcaatcaatcaatatcgtgccaagagaaaccaagtataataaggcgtaggcttggaggggtggttagaacaggaaagagcccatcagggagggccctgtggggaagaccaggcagctggagagtggggacgtcacgtgcgagccagggtctaggagaagcactctgcctggattcccatattcactccacaacaattatgtatgggtaggttttgttagctccattttgtagatagggaagctgaggttcaaagactaagtgtcttgaattcacggtgatgattccaggggcttccatcctccacccccaacagaagaaactggcccagtccccagtcacctctgcacacattgcaggtctcttttctgggccttgtcaccaccctatggggcagagaagggaggttagcctcattctgagggtaactaactgtcccagttggcctgggaccgagggtctactattaaacctgtagtagtctcaggcaaaccaggacaagttgatcagcctacttattccacagatggtgaactgaggcccaagtcacccctggcaggtggcagtgccctagacccccagagtttgccctactctcaacgcacacacacctgctgcctagagaccagctcaggaagggggctgtccttcccagccacccaattctctaggcttcatgtgacctggccctgagttggaggccactgaagacactaggaaagtagacagcatgtaactgagtcagggaaaccaagctaagactcaaagcgcagaaaggaagtggtcaattcggggctgaggaaagcaggctcctcctccaggggcaggtgcccagaggggcttggaatgtgctctgctgttgcttcactctcctccccaactggaaatgccctggcttttccagcaggggccttggcttatgggacccaactgtggagccccggcagagcccccactcagaggtaggagtgtgagttccaaagcccactctctgccactaaacctctgggatcttgaacaaatatcttcccttttctaggcctcagttaaaacaggcatcagaatatggtccaagtctcaggaatgtcgtcaaaacatcagagatcattcacacacaagtgcctggcagagcagtgaggaagtcccaccttcatgaccaagcccacctccagctcaggtctgggatcatagctcaggggatctctacacctggtccccaacttccaggctcactgctcccatgaagtgagcccaggaccagggaaatcaggagggccggtggggcctaacctcagctgtgtgttttggggaagcctttcagcctctctcagctttggttccgtcactggggggggcagtggggtgggaaagatgcagttttcccagagttattgtgaggttggggtgacactcagccagtacctagcactccagaggcagcctctaaatgttagggggaccccatgtcccccaccctgcacctctaaggctgctgtttgttgcagctcttaccttgcccagggctgaatgggctggaggggtgaggtggttccccagcttcccccagagcctcccctcccaaagcccagctccaaaaccttctccacccactgcaggcctatggtggcactcacactctctctctctctctctctctacacacacacacacacacacacccacacacacacacacgcgcgcgcgcgcgcgttcttacattctttttccgttgtttgcggctaattgtttattaggagatgcaggcggctgtgccagtgggaaggctcagcttgctctgctataattaggataatgcacattagtcatttagtgtaactctgagagcagccccctcccccgcactcccctcccccgctgctcctgcttagctggctgggttcccaggccagggctgtgcaggtttgttcaggttccctcctgggccttctcggttggccctggctctacctcactactagtccgtccagcagtccctaagccccccactgcctcccctgactccaggatagggttttctctattttctctctccaggcttatctcctatttccttcctctctgtcccctctttctccgcctccccctatctctttcctttgaaccctagctttctctccctctcccctgttctcagcccttctccctagcttctgcacccttgccttattgcgggggtctctctccctcccccagccctccatgggtaggtagcccagcagagcaggtcaagcctacactccaggccctggggggttggtggcagttctcctctctggcgtgactgtaggaggtagtccagaccctctccctggagcctgatcctcaggaggttgtccttgctgctgccttccctgacactccccgcccccaaacacaacccactgtttttggctgaggactaggctggcaaaggtaggccattgtctccaaaaggcccttcccacaagcacaccagtgtggcctccttgccttgttccccccttccctcgtggtcatcctgagatccaagaaattgggccccacaggaggctagggtgctggggggtgaaggtgagggctctcatcatgctggctggagcaggtagccctctgtttcatgtggcctggattgggcaccaggcagccgggtggtagggagtatcttttccactaggaaagagaggctcttcaacagtgtctttttgtctctagctgcacagccgctggccaactccagacctgctgacaaataaacctcctgacccctattcctacatccctgagacccccacgcagccctttccatcacaaaagggacctcacatcaaagcccattacagctaggcagactgagctctagggccaagggtttgccctgcaggtcgctgctggggtaagggtgagggtggggtccctccagtgtttcagaaataaaagagctgttcccaggggtaagcgatgcttgattggaagtacaaagcctttcttgtcttcataagcctgttgatgtctctggtcctgatcctgaaatcacagatgcagacagactaacagacacaggcttacaacttgcagggcaggctcacagagcaggtaccacagagggcctggggtcactgtgcacttggaagggccagagcttctgtcccctacatctgatatctctcctctgcctggactctccatgcaacaactgggcctccaaactccaagcccctcttgccttgggacccctccagcccagggacaccagcctgagttgtacatattgtagtccctgcccctagaggtccacatcaccctatcctgaactactccttctcaccctccttctctatcatgtgccccgaggctctgtccctcagtgccatgtgcagcttacaggatcccatgggagcagagtctagaggggaagggagggaccatggcccagctgatctcccaggaccagggaacctttccttggcctcctcttgggattgcttccccataggtggcaaggctccaggggccagaggaaggtacccctgagactagcagggaactgggaaacaagagccctggttttcagtaagtctctcataccaccttgctgtatgctttcagcaagtcttccctccctgggtttccccaggagcaggactaggaggccagttcaggggctgtcctggtggcagcttcttggggtctcatggccacctgtccttctagtaccctcgtcctccttcaggctttcaggaagcagacctagcccccaagttagctgagcttgattcattctttcattcaccaatctgtagtttagtacccccctccccgattcctctgcctaggtctctgtgatttccttccttccttactctcaaagatgaggaagtcacactgagcagcaggcttggtctggttttaggcagagggagcaaaaggagtggccagtttaggatagatgtcccaggatggggtacagcaagggtgcctgcaaggggaagactggcacagatgtgtgtgtgtgtgtgtgtgtgtgtgtgtgtgtgttagcacaaccacctcccagggccatcccagtcattccttcactcactcattcactcgacaatcctctgttccacacagaccatgtgtaagactctgtgctaggtgccagggattaaaaaaaaacagcagggtctccacccttagcggcaggcaagttgagccccagtcagagcacaagaggattcgcattgggttcacatataggagagaggggagtcggtcgctgggtcttggaggatctctgcctcctgactcaggaggccgtgtgggggatccatttaatgacgatgataataacactcagagaacagctaacatttaaagagggctgcctgtgtgccaggcaccgctgaaacatttcacaggtaatcttataacataggcattttgttagcaaagcaagtcagtgaaaaaggggctattctcactccgttgtacagtttaggaaactgaggtgggggatgtgaagccacttgcccatgatcacacagctaagaaatgacagagccagcctgacccaaacctttgtgacccttttttctcatctgtaaggtgtacgggagggaccctgatatcccttcagctaagagatggggagttcccaggcagatggcaggaaaccagagctgctgggagtcagcaggcaggaggtctcctgggaggggattcagggcaaagtggaggaggggcgcccctcctgctggcccctccccacagctgacttttattccaacattgggttccagccaagcatgggggtggggtggataacagtactgggaagctgcttctccaggatttacaacctgccagggagtaggcaagagccatctgggggctgctagctgctggtggcttcagtggctcttcctcccacccacccactgagggagtggccacagcatggagtcagtgattatgtattccccggctacatgtccttgctctggggctcctgctgctcctagcgcagcccaggctgcagtcacccagaggcactcagtgttgggaatacggtggagagaggaaagtggagcctccaggttgatgagggagacactagcctgtgccagaggagaacccaggctggtcctagagatggggtctgcagcttcgtggtggggaaggtttgagctgctttggaggagggaggagctacagggctggggatggggtggacatctccctcagaccccagacctcagggaggcactcatccctctgtctctggactggacccctcttctcccctctggcccaatgtggtttactgcagctccagcctggggtggggacatgcctgtggggaccagcttaggtggtatctttgtgcaatttagaaagatacaaaagcagcccctcactaggcaccgggcttggcgagcagagccggggctgggttttaacctctgtttgctccttgagctgtgcatctttgtccaagacaccaactgttcaatagtattatacatagaggccctgccctggtgcttagggaaggcagtgttcagggcccaccgggcccaagtcatcacctctccttcggccagctgactgctacctagtccagaactccctgcagacataaccgctacctacttctaggtcactcatgtggcatgcagagcagggactatcctcttctcccaaagaaagaagctgaggcccagagaaaggaaagaaactgcccaaggttacgcagcagatcagtgacagagctttctgggccaaattctagggcccctcaacagctggcactccttccagcctcggtgcctctttggaggcctttgggacactgctccatgtgcctgtcatctctgtacttgtcttatttaacttaaccaaccttggcagaagacctgcgtgagccagacaatgcaccaagtgcaggagaaaaacaggtgagcacttccctcctctcagaactaaataaccaataaatgttgaatgaatgaatgaatgaatgaatgaacgaatgaacactgagcaccaactttgtaccagaaattacaccaagcgagcaatttgcttatttaatcacaactctgtgaaataggttctaagctcttcatttcacaggtatggaaattgaggctctgagaggttaagtaacttgcccaaggacacacagctatgtcagagctgaaatttgactgagagtttatgtgactccaaagccaaacgggctctttcttatttttttaaggatttcctctttaaaaaaaattcttggaacaacttcaaacactttcatttattttaaatggcatttatttttccctttctaattttacaagcaatgtgtgttcattgcagacaactggaaaatacataaaaacataaagtaaaatatagcaatcatccataatccccaccccctagagataaccaccattagcattttgatacatttcttcccagtgtttacatctttgtacataaaattggtattatgccatatagccagtttaatgccctgctttgttaattcgcactattttgtgaacattttcccattcaggtaaatattatttttgaaaacttgatctacaatggctgcatatatccatttttatgcatttgcatttatttaatctaactctgcttttgacatttaggttgtttctaattttttactataaacatagcattacagtgaacatctatgtaaatttttttgttttttgtttgtttgttttagagacagggtctcactctgttgcccaggctggaatgcagtgatgtgatcatagctcactgcagccttgaacttctgggctcaagtgatcctcctgtctcagcctcccaagtagttgggaccacaggtccacgtctggtgattttttttttttttttttgagagatgggatctcgctttgttgtccaagctggtctcaaactcctggtctcaagcgatcctccctcctgagcctcccaaagtgctggaattataggagtaagccaccatgcccggccaacatttgtaaatctttgagcagatttctgtttattagattcccaaagcaggatttcttgggtcaaagagcatgaacagttttaagacctttaaagcatattttgtaattgctttctagaaagcttacctagttcaccctccactaggagggcagaggagtgcaccagttctttagccccttgctaacactgggtatcgctgattttttaaaaaatgaaacatctttctcaagacccaggtttttcccactgcaacgctctgctccacaggaatgatttggtatcatgggctaataattccccatttgcctagggggaagtacggccctggagagcagaaatgacctgctaggtcagatttgccaatcagccaaggaagagcaggcctggaacccaggcatccttcctcccagttcagagccctcttctttatacccttggcctcagcttcctccaccgcaggtctcctgggttgggggtgtttccccagggccagtccgtcctactcccttaggttataccactcctgtggtcctccaggtctgggttggggtggggttgctgggcagagcctatttctggcctcttcatcatggaccacatagcacctgggattctcaccactggcactaatcatggctcatgccccctctcattcattcattcattcattcatagatttgacaaaaagatgtgttttgcatctatatgggccaggcactgttctaggctcggggtacttgtcatcattaactatcagcaacgccaacgttatgctgcgcaagtcacagcctcttcagcatcttcaccagctcttcctacttagcgctatgttccaagcatctgccataataacaacgcctggaatgcttcataaatatacagataccaggcctgtcccctggaaattctcactgtataggcactaatcatggctcatgccccctctcattcattcattcattcattcattcgtagatttgataaaaaaggtgtttcacatctacatgggccaggcactgttctaggctctgggtacttgtcaccattaactatcagcaatgtcagcgttatgctgtgcaagtcacagcctcttcagcatcttcaccaacccttcctacttagtgctatgttccaagcatctgccatgataacaatgcctggggtgcttcataaacgtggataccaggcctgtcccctggaaattctgactgtataagcctgggcccttccgtaggcattgtttgctgttgttttgtttgctctggttgattcctatattcaggcaaacccaggagcaagtgctaacagatccctaaacactgacatctggtgtggatgcatgtgcatgtgcacacagaggtgagcaggccaagctccctcccagcacagcccagcacccttgagccctgctggcacacctgctgtgcctctgaaccacaaactcaccaaacctaatgacaattttttttctgatttgcaagagattagttttaatttggagacaattagaggtagaagcaggaggcatcagatcttgattagaagcagagacatggccaggggagcccccacccctagcctgcccggccctagcttccacagagattcatttatgtgcccaataaggtaggggctggcctctgcacctggggagaaggttgtctgggagaggcagagggcccctgctgtgctcccagacacctaaggcaagcctgggcaggtacccccaacctcagaaaagtatggaattgacatttgtttcagcacccactgtgttccacttgagttgggcatctttgtccaagacaccaactgttctatagtattatatatagaggccctgtcctggtggttagggagggcagtgttcagggcccaccgggcccaagtcatcacctctccttcagccagctgaccttgtactacgcaaagctggtccagccccagtgtacaccaatatcccagttcagctgcataggcagaggtatgaaaaacaactatgtgccatctaatggtggagacggcttgagagacctctgtgcaggcacagggacacaggagccagtgtctcatggccccaggggagcaatcacagaagtgactaatgagagagttcccagatcacatgcgtttcactcataccaggaccaggatcctcctgatctgtcagagtcagagctggccagagcagaacagtggcagagaggaggaggggttgaatgactaggatggtggccgtgagaggtatcagcgaaggcttcaaggaggaggcagtggctgagctgggcatggaaggatgagggggacccccacatcctcccacatgcaagtctgctcttgggtcttgttgggtcagataccctcctgcagagctggtgaagccactattcatgtatttgtctttttgggttgtgagaagaacagagctggtccagctcatatggaaagggtccctcgctaagcacagtctggcaggggtcggggaggctggggagagctgggaacacctcagtcatcatcattatccccatgtgcaaaagctggatgatcccagcctgtcttcctccccctgtatgttgtctctacattttactggggaaactgaggctcggaggggcagaaataccaaatccccatgtatcagtttgctagggctgccatgacaaagttccacaggctgggtggcttaacagaaatttattttctcacagttctgggggctggaagtctgaggtcaaggtgtcagcaggattgatttctggtgagggttgtcttcctggctcgtagacagctaccttctcactgtgtcttcacaacttctctctgtgtgtgtctgcatcctcatctcttcttcttataagtacaccagtcatattggattagggcccaccctcacagcttaattttaagcctagtagcctctttaaggatcctgtcttcaaatacagccatattctgagatacggagggttaggatctcaagggcagggcacagttcagcccataacaccccatcataagtcagaggagacatggagaagccccttttctcaggagacggcagcaagggagagggtcccagggccagacccaaatgactgaagaccaagtcagagcccaggtcatcagcaggaaggcagcaggcaaactggtctgcagggcaagctggggtcaaaacagaactgcagcctgggggcccagtggagccagggttcagaaccaggcccacggaattgttatgggcagcctgctgtggaagtggggggcgggcaggtgccagcctgtgtgtgtgtgtgtgtgtgtgtcctcccaggtcagtctggagggcataggcacaccttagtgttgtgcgtccaaggtgggtccaagcagtgccttcccccacaacctctcttctctcccacctccagtcctggcctgacctcagtttctgtgttgatcagcctcccttctccccaccccacatctgtcttccttcaaggaaccttccagtagcttttcctcccatgccatgctccatgatgtctggcagtcagagctctgtgccgagatgcaggccagagtgcatgttagcacacacgcgtgtgtgcactcaagcacatatttagtgtctctgaaaacttgacagaccaactgatctgctcattccaccagtcttacctcttccctctctagccacaccagaacgcttccagggccttctccacctcccaggagaaactgaggtccagagagatcaagcaggttcctttaagctccagaacaagtgagtgggagagcagagattagtgttaggtctcagggacccaccctgctccaatgctgaggagactgaagggccccagcaggatggaatggttcatggtggtgatgggagaggctgctgtgggccacagtgacataaataaaaaattgcaatgccctaatgtcagctttccggctccctcttctgaatgccagctgttttcttgatacaggttacttccccttccagaaactcagctttcttatctgcaaggttgctgacagggtccagagcccctaggcctggtgccaggagccctcccctcagtggccacccagtctcctcttggatgccccattgacaaggaactcattaccctcacagcatcccagtcactgccgggctgcttattcagagaatttcattctttcaacaaaaatatattgagggcctgcctgctatgtgccaggccatgttgtaagcactaaaatagagcagggagtaaagccatgtctgtgcccctgtggaacttaatttctagttggcagaaacagacacatgcatataatatagaggtaagtggcggtaagtgctatgaagaaaatgaaacaggaaaagggatagagagagatcagtggtggggctgggggagagacagcgctactttagataaatgatcaggagtatgtccctaaacaaagattgatgagagagagagagaaaagagagggggagagaaacattgaatatcaaggggagaaaattcaaggcaggaggaacggcaatgcaaaggccctggggtagaaatattttctcagtgtaatccaagaacagcaaatggtttggatgatccaggatgttggttttgccagaccaggtcctcccccagggggggtgaggggatccgggtggggcatgcagtcacaattgtccaatcccttccttcatgcccctctgagtccggtgcccatctggtggtctctgcccctgccgtgcctccaaggaatccagatggtcagccgtgaagttggaacagtaagagagggcaaaggggactaagtgccacttagcagctctggggtctccaggggatggataactaaggcagggctagtacccgctcccccccccccccccgtccctctacagcctggatagtgagcactgagagcccactgaccacagctgcccttctcccagcccagagggaggagcgtggggccccaccttggcctcagcactcaaaggccctgtacctccccatacatgcagcagtgcccctgccctgggctgctctgcaggtcccagaggatgtcctgttcttggtctttcagctactctcaacatccctgtgagggggagggactgatgtcaccaccacaactttagaggtggaaatggaggctcaaaatggaaagcaacttgcacagtgagtctgtggcagggagagggcttgcacttgagtcccaaagccagttggttcgcctgcttgctgctgcttccaaagcagggtccaaatgtggaccctgcatttccacagttggcctcggggccagcattccccaggctgcagggacacgttatgagacctaggcaccagccagaaaagctctccccatctctgcaaacaacttcctgtcctcacttggactctgctgcacacccccaccccaccatcagctcccagcatttcttgccggtgatttccccagttggtcctaagggctgctcacgtccttccgagcatgccacaggagaagtggtgagagcatgtgccacgcctcttaaaacaactgaccccgagggcctttgtcatgccccaagcctgttgccttattttttgaacaaggaagattactgcagattttatttttttgaaggatattgagaccagagcctcaagagcaaggaatttttagttcaccgcttttgcgaggaactggatgtgaatgtttgtgaaactgccaaggtttaactgacagtggtaaaatgataaatatgcataaactgcaagtaatatctagtactgactaggagtctcctctttgggacataggtctctgcagatcactcagtgtagatcagccatgatttgttgaaggctttcttggcgcaaggccaggtaggtaactaactcccacacaggcaggatgggaggtcccttcagagaaggacaaagctctgaggaaacccccaggagttgagggcacatcttggagggcttcatgaaggaggtggcattgaagctggaccctggaggaagattcagatttggatatgcacagataggaaaggagataatctaatgcagagggtgcagcatgaacaaaggaggggagataaggcagcagccgtgagtgtgaaggtgagtgagttgtccagttacgccaccagcaggggattgggaggagtcctaggagaaaaaggatcctgacgccttgtgtagggggccctgaatgtcacactcaggtacaaagtgagtttggattttattttgtaagcagataggagcgcttctttgatatacacacatttgcattgtgttgcacaatttatagagtgctttcttatttgattctgagaaacaaaacaaatgacaacacagcctcctgcgagaccagcattactgttatcattgtcctgtttttacagttgaggaatgtgactcgggaggttcttggggagatccaaaataagatttcaaacctcaaacctccgtttgggtccttcctgttccttgacagtgtccaacgagttttgggctgggagtgagaggggcaacaatgtctgatttgtgtccaggagaaaaaaatactctggctactgtgtgggggaggagaatgccagagaggaggggagaccctattggccagtggtatgtcgtcatagcgacagcagtaaggccagaatgggggcagggagggaggacaaggggcagcctgaggtggaattgccagaagttggcagcttccttggtgggtagggagaggcagttaagaggagggaggaggcccatgtttaggtgtgggagactgaggataaaatttcctggttatatagtctgtggccaaagggagaagggagagagctggatccctggggaccctacaccagctgagagagcaggtacaatactaaggagcttgggttcgagagtcaggggaccccaggttcaagtcccactgctggcccctttgcccatataacttggttaaattatttaagtgtcctgcaccttagttcatttatctgtaagatgttaggattggcactcaaaaaggaagttactgatagaaaactggtcgcgtggatggagatcataataagaggtacctcagagcattgatctgaggatgaaatacgctaaggcctgtcccacacggagcgcagtgcaggatacacagggatcacagggactcttttcagcaccagagtccactcagccctctatgcgcacgactttgaaagtcctcacaatggcactttgaggcagaaacaatttttatacttgttttacaagtgagggcgctggggatagaacctcctgaaggttcacaaggttttgcgacggtattatctttacccctatgtcgcaggtaaataaatgaagcggtgggtgagagggtaattcacataccagcaaagggggtgccaggcttggagctctgggagccaggcctgagccagggttggggcccaccggaggatggacagccaggctgaacctgcccagctagaggagttggcagccctctgtggggtgggagagacgagcctgggggcaccctggggtcccagcgtggcctctcctgaccaccctgggcctctttcctctgtctgtccccagcctctggccgctcccacccggccagccccagcccgccggggccgcaggccagcccggtgctgccagtcagctaccgcctgtcgcacacgcggctggccttcttcctgcgggaggcgcggcccccgtcacccgcggtcgccaacagctctctgcagcgctccgagcccttcgtggtgttccagaccaaggagctgccggtcctcaacgtctctctggggcccttcagcaccagccaggtggtggcgcgggagctcctgcagccgtccagcaccctggacatccccgagcgcctgacggtgaactggaaggtgcgggccttcatcgtccgctcgcacgtgcccgcctcgcagcccgtggtccaggtgctgttctacgtagccggccgggactgggacgacttcggcgtcaccgagcggctgccctgtgtccgcctgcatgccttccgggatgcccgggaagtcaagagctcctgccgcctcagcgggggcctggccacttgtctggtgcgggcagagctgcccctggcctggttcgggcccccagcccccgctgcgccacccacggcccgccgcaagtccccggacgggctggagcccgaggcgacgggggagagccagcaggccgagctctactacacgctccacgcccctgatgcgtcggggggctgcgggggctcccgccggggggccgggcccggggtgggggcccgagcggaaagccctacccagcaccccctgctgcgcatcgggagcatcagcctgttccgcccgccccccaggaggaccctgcaggagcacaggctggacagcaacctgatgatccgcctgccagaccggcccctcaagcccggggaagtgctcagcatcctcctctatctggcccccaactcctcctcgccctccagccccagcgtggagcacttcacactcaggtagtagggaagatgggtggggatctggtttcccttccaagatcaaatgcatacctgactccttgtgggtgggttggggggtggggggacctcccagctgtatccctgtccagcatcctaatcccggatctgtcacttagcacttgagcaacctcaggaagatacctcgcttattggagcctcaaggctcttatctgtctaatggcaacaaacattcctgcccctatttctggatctcatagaaatggcatcatggtaaagaggaaatatcagtttcacaagcatagatttccagaataatagaactgggactagaagggcccttagacattttacagacaaggagactgaggccaaggaagagaaattgggtccagagagcagcctcttggctgggagccaaaagaatcgtgtgtgtgtgtgtgtgtgtgtgtgtgtgtgtgtgtgttttgggacatttgccccagtcctagagttgggagaaaaattttcagaattcccagctctttctatccttctacaccttgaaaaggacacagtttgcaaactcaaaaatgccttaaattgtatcacatccaccccaaaaatgataatatttcacactaggaatctgtggtttgagttatgttgtgtgactctgaggacacccaccaaaatgcttcctcagccccaggcactatgccttggacctgaaacatcactataagcctgcagcttctttaagtatttccctgtctcctcagtgtcctaccttcaagtttaaatgctgtcggaaagggtcatgcctcattcagtgattgatacctgaatgtgaacataagtgaaatcagtcatcagagatcttgggctgcattaataggagtagagcttgcagaattagagaggtggcaatcaccttgctttagccaatgttcattggagtgcagctgaagtgtcgtatttagtatgggatacttcacatttagtgtccagaggagtgtgactggctgtgaggtgattcagaactatggcaaaaaacaattggaggcactgaaggaaagaagattcagagaacacctactcacctcgccagctttttgaagaactactacagttaggacagaggggaattgttctctgttgcccagcagagcctgtggctgttttagctcagctacatccagggaagatctttctagttttcttggtctttctgaaaatggaatgggatgtgtgcagaagtagtgagtcccctgtcactaaggtatgccagtagagattaggcaaagacttggcagggatacggtagaagggattgcagctttcaccgagggtcagagttttcagctgtgtgataccagattccccaagttcatctgaaacattcatctgaaacatccaggactcggggtaacttagcttatctgttccccctccccccagtacagtctagtgatggtggccaggcaggcagctttgggctgtagcctgaccctctccctcttcttcctcccactttgtcccagggtgaaggccaagaagggtgtgacccttttaggtaccaagtcacggagtggccagtggcatgtgacctcggagctgctgactggggcaaagcactcaacagccaccgtggatgtggcctgggctcagagcacacccctgccccccaggtgagcccgaggtggtgcatctacccacctcttcgcaaagcagccatctgagaggagtggggaatctttgaaggaggaggctaggcttggggagggctggggctcggtcattggggtctctgaggtccaggcccctcagtgggatcctggggctggagcacctcagatgggctggagaaggcccagagggccccatcaggcagctgccggggaggggtggggtccccactgagagtttctgagctcctgggctgctcccagcccttcatcctctgctctccttccctcccctaccctggcagggagggccagggccccttggagatcttgcagctggactttgaaatggagaacttcaccagccagtcagtcaagcggaggatcatgtggcacattgactaccgtggccacggcgccctgcctgacctggagcgggcagtcactgagctgacggtcattcagcgggatgtgcaagccatcctgcccctggccatggtgagcaggcaggtgaccagcccagaagatgcctgggtctatgcatgtgtgcacatttgtgtgacaagaatgtgaaccactgagtatatgtacaaattgacatgtgtgtatatgtgagacttcctgccatgcccaggtatgcctgtgtgagaaggtgcatgcatgtgttttatatttgtcgggccatgaggacagcagatgctcaggggggcagaggtgggagatgtcaccatggagggaccactgatgggaagtttgcagaaggaggtagcaatgcagttgagtcttggaggtcacctgggagggagcctcccagagatgcagggtgtgtcccaggcagggcattacttgggcaaaggtacagtagtgagaatatgagtagtttgttcaaaagaactatagatttagaaagagtgtcatggagtggtagggctggaatgattgtctggggccagcccagggcagcttgaatagccaggcatgtgttggatgttactgtgtgagtcctgaggagcctggaagctgtttaagaggagatggcaggggcctggggaagggttgtttcccggcagcacagtgaggtggaccctgaggttcctgcaaaagcccgagtgagcagaccatctgtcaaggagtgccaggaggggtggttgcctatccctgcacacgggtgcaagtgtccccactggaaggatgtgcatctgaggagtggggggggagcgtccaggagctggggccttggctagtgtgtcccaggacagaaggggaccacaagtagagccccccccttctcctccctgcaggacacagagatcatcaacacggccattctgactggccggacagtggccatccctgtcaaggtcattgccatcgaggtgaatggcctcgtcctggacatctccgccctagtggaatgcgagtctgacaatgaagacatcatcaaggtgggcatcctggaggtggggcccctggggaagaagccctaggccttcaggagagtagaacctcaaaccagagtccaggtggctgactcttactcatcctctaacactgaacccaggcctccctgtgctgggaccccttctgttgcagcagctgcccccaccttttcctcctacagcactggccttacttcatcccaagcttcaccacaccattctgaaagggttgattctcaagtgtactgactcccatgatactccctcttcctgcccctggatattgctttggccagtcctggagggcttcctgtaggaatatgaaacagacagtcaggccagagggggagaaagcagtgtcaacaacttgaaatcaatctagcaagacattattgaaccttggtgtgtgcagacacttggcaaggcagcagggggtgggtgagggagacaacccctcaaagacctgccgtgaacccagagtgcaagtgatcagatgaaggcaatgtagctcaggaagaagcctcaagaaacatatgagttaggccaggcatgaaggttgtgtactgagggccccactcccggcacacacgctccagcttctccaactcctaaaggctcctgtcagccgtgagctcccaccccacccctgagctccttcccagggacctgctttggccccaggtcccccacagcccagcccacatgacactcatctgactcaatgacccagtttgccacctccccaagagggctccagattccctccttcccctggctttgaacagtggtcagaagtgagttgggaagaggaggcagtagagtgggcagtggtgtgagcagatgtccagccctggtaactgtggggtgggccagccactcactatgccaccctccagtaggcatcaaaatcagatggttagacaactgaatttgttcttgctcctgtaaataattcagcttgaaggaaagcaggacagttggaatgcagatgtccttctcctccttgtcacttgggctccctcctgctgtctctctctctatgctttgcctttgggtccctccaagtctgggaagcatggggctcacctcatctatccatgatccaggaaggatgccttccaagggagccagagtagatggtctggaacccccgctccactgcatcacccccttcagagaagcctcaccagaagcctgtgagctgtccactgctggaagactgggatgggaagaaacaggcctgctcccaagggccctcacccagcaccttctctgccacccagactcccccatcccagctccagagcagaccagaaccaaggggtaatcagagaagattctaaatgaaattggttacaaatcttgatgaaatatactcaggtctttacggagtttgccacattctaagtggaatttacaggtctgcgttggaattctttgccttccgaggtgggaaatgagcatttctggcagggctgctgtcccatccctccacccacccctctgagatgatgatgggagctggcagcgtttgggatgccccaggggctcatctccatggataaaccatagtcccagagcccctgggtccttccagagccttcagggcatcatcagcccaccagctgaatgatagaccttcccccaaactcaagaccatgcacccatggacgtgcaccagcatgagcacctagatgcatgtacacacaggatccgttctggggtgccaggtgtgtgcgtgggcatatttaacacacagagccatctgcatttgccctaaagtactggcagtgacacctctgtgagtgggcacaggtatcaatgaagatgtactcagcaggcatgtggtttccatccagggaacctctaggaatgcaagtcagtatccaggtgggcaggcatttacaacagccacatccattggtggcagccattcacccgtctgtgcttggggttctaaggtcctgagttttcctctcccattccctcatctccacacctggttaagcagcccccctcaccggaaattaactacctgcccattctcctggggcagccatgccagagaggccgtggaggacatgggtctgccccccatccccatcccctgcacctcaacttcctccctgcccagtcaagtgcccatgtcctttttctgcatcatagaggactctacctgccagacccctggctccagagccccgtcagtcttgctgggggaggggagccagccctgagaggccctcaccctggagcgtcctccaaagcgtggctctggcaggtcaggaacagcccctgtaaaagcatttgcatgttggctccttactaaggaacaaaatcctcccccagtgggcaccaagaggtgatctcaagaaagagcagaagcagtgatagaagccaggactcccagaggaatcagtgcttccttccactggcctcctccccttcagcctcctaggactttccctccagccctggttgtcagactgaagtcctccgcactgcctcacaggaagacctgtagggaagatgtgccaactgttcctcccttcccccaggtatccagcagctgtgactacgtgtttgtgagtggaaaagagtctcgagggtccatgaacgccagggtcaccttccgctacgacgtcctcaatgctcccctggaaatgacagtctgggtccccaagctgcccttgcacattgagctctcagatgcccgcctcagccaagtgaagggctggagggtacctatcctccccgaccggaggtacagcccctctcccatggcggatacttgggaaactcatgggtggatacagcctcggcccacagtctgatctgcatatgggtataaggcccttggtatacatagtctgtaggttggttgtgcagtcaacaagctttcattgaccagctactgtgtgctaggcactggcaagtgtttgagagatggggtgaatgtggccagtgcctgaccctgccagtctctcagtccagcaggggaggaaggcatgtgcatgccacagaacatggtggtgggtgggaagccccgtgtgcagggaatcaagtggcacaaggagagaaccccctctccctccaggagaagtcaaggcaggcttcctggaagagacaactcttgagctaagtcttaaaggatgaactgaaaggagttggctggggagacaggttaagagactgcctgcagtcaggcagacaaaatgaagcagacacacctgtacacatgtgtcccagcctgggcacaccaagggcacactagtgagtgcatgagtgcagacacactgtgactcatacccaggctcccttgcgggcttgtaggctcaggcacctgggtgcccatacgtggggcacatacatgtgtactcaccgcattccaatcacccactcagagctgctggagagaaaagcacagcagggaagagaagagaggaaagtgacaggcagctaagagcaggaggtgggcggggctggagagggaagcaggtggtgagagaaacaggtggccaagtgagaattgggctgagttcaactcagagagatttggaagagtaaggtgtgtagaccagtgcctctcaaactttaatgtgtacacgaatcacctggggatctcagtaaaatgcagattctgactgggcaggtctggggtaaagcctgtgattctgcatttctcaccagctcctgggtgatagcgatactgctttgagtagcaaggatgtagcggactctgaagccagacagcctggtttaagtcctgcctctgctatttactagctgtgtaaacttgggctacttacataaccactctgtgcctccatctccgtatctgtaaaatgggcacaataacacctgcctcataggatttttgtgaggaataaattaatgaacccaggtaaaagaatgctctgtgtgaatgaatattctggttgcttgatcctccagtacactaacaaagcactagctacagagaaaaacacttggctttctcaccaaagcacaccttcctggcagtaaacctctcaattttagcattttttgcaacgtgcacaggctgagaatttcccaaatcatcaagtccaggttcccttttgcttaacagtttatttatgtgtctctctcctctcacatttgactaaaagcagcaagaggaaaccaggccacgatttccacaccttgcttggaaatctcctcagttaaatgtccgagttcatcacctacaggtcctgcttagtttccacacaactgcaggacacaattcagctaagatttctggcattctgtaagaaggatcacatttgctccaggttagagcttagaacagtgccaggcacaaacttagtactgaagaagaggcagcagttgctgttaggatttgacgccagctattcctaggcttggcttaagccaagaagaggcagagagggacaggaggtagggtcaagaatgtacttttctaggagagaaaaggctgggactcctggttcccaacttagagatggaaggcatgagccatagaggaagcttgcttttgcagagcttctgggaagctgggaggacccaacagggcaagggtgcggggtgtgtactgtgcaggtcagagtccaggtgagaagccttcagcatggcatgtccccaccccaggtcagtccgggaaagcgaggatgaggatgaggaggaggaggagcggcggcagagtgcaagccgtggctgcaccctgcagtaccagcatgccaccctgcaggtcttcacccagttccacacgacatcatccgagggcactgaccaggtggtcaccatgttaggcccggactggctggtggaggtcaccgacctagtcagtgacttcatgcgggtgggcgatccccgagtggcacacatggtggacagcagcacgctggcaggactggagccaggcaccaccccctttaaggtaggtatgggctctgtcccagcacaaaggggcagtgtcgggagccttatttacctgtgggtgcagaactcagattttcctaaccccaactggcccccagaacactcttccctgcctgccccttgtctgaaattccaaggtcaggctcttttagcttcatcttggtaaaagttctcactccaagttgtatcaacctttatcaatcctcagtgtgggtgactcaagcagacccctccctgagagcagagggggagcaggtgagagtcagccagcctagagtccaggaaggtgcatttggtgatctaggaactcaactttgacctttcctgacttgtttctaccctgacaattgggtgtctggatagaaatcatctacctaagaaactgttgtgatctgtgggctagaatctgcctgcagacatatcttctttgtaaaacaattgatccaatgtgttttaaattgggagatttctcatttaaaaaatatatagagatttctggtttcacaaaaaatgaatctggtaacaatcagctaaagccagtattggtgcctcctatacacgagaatgagttccctcattttctaagttgtcgccactcccttttgtctccctgacattgaggttgcacatcaattgctactagtcaccatgcgggggttgttgttttccttagaattggcccacctctctcatttgtgttcccgcctggctcctgtgagcccccgaccctctcatgacctctggacactggttcctggttgcagacctgaggcagagctgcgaagtcctgcctcccagcctgcctcacccttcaggcccctcttccagcagtgctgggatttctccctagctgggggtcttgggcaggggggtgtgctttcctggttctctcccaccccggtcccgctctgcctcaggtggtgtctccgctgacggaggctgtgctcggggagacgctgctgacggtgactgaggagaaggtcagcatcacacagcttcaggcccaggtggtggccagcctggccctctccctgcggcccagccctgggagcagccacaccatcctagccaccacagctgcccaacagaccttgagcttcctcaagcaggtaactggctccttggcccaccagccagggagttggtggtatggaaggagaacttgggggctctgctttgccctagcaccaagagtccccatattagggctttaggaaatggaggatctctgccctccatgccctgcacaactgcccaccctatggccacaacatctacatgggaggtcagagcaaggtcttgcttgctgctcttgccacctgagatgttccctctgagggtctccctcctggattcacagagggctgtcacctccacatcacccccaggaagtaccctcactcaactctggagccccaagtatacaccacaggcatagccacaggatgaaagtggaaaggtgacagatgagagtcctggggagtgaggaggtgacaggtgagagtcctggggagtgaggaggtgagcatcaagtgctgagcccggagttaggacacgggtcctctgtccctaactcactccatcaccccaaggcaatcacttctctctgaaccctgcttcctcatctggagggagggcaatcctcagaaggttttagccaacaggcagaagtggggagggggtgtgtattctcaacagcctgttgtctgatgggggtaagcccaaggttaggcatggagatatggagctattccagcagcagaagggacttgaattagacccaaggcaaaacttacctttaggttatccaggggagaagggtgaagtggacaagggcatcctcagagcagtatgaggcctggatgccatggtctgggatttaccctccccacaccctgtgaggaggactctcacttgaacagtagttcctgaatgcccgccacaggtcacaggcacagttccagtgctgagaatacagcagggagccagagacccgtggtccctgcccctacagagcccaggatctagcaggaagccagctgaaccagctctttgactcctatcccctccttctccttctcctccaggaagccctactgagcctctggctctcctacagtgatggcaccacagccccactctccctctacagcccacgagactatggactgctagtgagcagcctggatgagcatgtggccactgtgacccaggaccgggccttccctctggtagtggctgaggccgaggggtcaggggagctgcttcgcgcagagctaaccatcgctgagagctgccagaaaaccaaacgcaagagtgtgctcgccacgacccctgtgggcctgcgggtgcactttgggagggacgaggaggaccccacttatgactacccgggccccagccaaccagggcccggcgggggcgaggacgaggcccggggagctggcccgccgggctctgcgctacccgcaccggaggctccaggcccgggcaccgccagccccgtcgtgccacccacagaagacttcctgccgctgcccaccggcttcctgcaggtgccacggggtctgacagacctggagatcggcatgtacgcgctgctgggcgtcttctgcctcgccatcctcgtcttcctcatcaactgcatcgtttttgtgctgcgctaccggcacaagcgcatcccgcccgagggccagaccagcatggaccactctcaccactgggtgttcctgggcaacgggcagccgctgcgggtgcaaggagagctgtcgccgccagcaggcaacccgctggaaaccgtgcccgccttctgccacggcgaccaccacagcagcggcagctcgcagaccagcgtccagagccaggtgcacggcaggggcgacggctcctcgggcggctcagcccgagaccaagccgaggaccccgccagctcgcccacctccaagcgcaagcgggtcaagttcaccaccttcaccacgctgccgtcagaggagctggcctatgactcggtgcccgcgggcgaagaggacgaggaggaggaagaggacctgggttggggctgcccggatgtggcgggccccacgcggcccactgcacccccggacctgcacaattacatgcgcagaatcaaagagattgcatagaggcgccagccggagtagcagggacccccccccccaacggggtcagctcggggtaggacacagccgggaccccggttcacactgactctgggcggctgaattgattttgtactccctgcccctgcagcttggctccgtgcggagcgggccgcctcagtgtctgggccttccctcgcctcacgccattaccctcttctgccccctgcaggtggagggctcttcctccagtggctcgtaaggaggaaagcaaccccagcctctgttctgccctttccaaacctcctcccatcttaagcaaccccctgccccaagagtgaggcaaggaggtccagcttggggtcaggtgggcccacgctgtgtcccgggcccgcctcccgtcccccgtgtcgtccccctgtgcagggggttctgtgggggtcttgtgtcacaggctgcacaaagactttcctcaaactaatattcagggatttctgtcctgcagggtggggaggtggcagctgcctgccctgccaaggatcttgctgtggacgaaatatctgggggttagggggacagttgtagcatctgctggcattcgggtgcctcccaggacctgggagctgactctacagagaggtctggtgccaagccaggcaccttcctgagttctcaggactcccacctctgccccaagggctttgggcagggacctaaaggggaaagagtcctggatccatctctagccaaatcacaccccagagccagaggcctggggacctccttgccttccccgtcccccacagcaaggtcaacactactacgccttagccacccgtcaccctgctgactgcgacttccctctgcagcacagggcaggcagccacctatgccccacaagacggaacccgggaggggagtagagggcaccagggaatgctgtgagggacttcagggtgggcaaatgcagaagggagccagtgtcgcccctaccccatcccacagccatttttctctcgggttctacccaccactgtgtcggatttttcttaaataaatggaagcggtcagactggaggtgggggcagcagctcccatgaacagagagtacatggtggctggctctgtctcttccttatgtgcatgggcaaacatacacacatacacaagcaagtgcacacatgcacacacacacactcacacactgtgggcacactacatgacatgagaccaaaactcggctagaccaggctgtggtcccgctcttcctcccccaacatgcaggtcctttaagaccctctggtactttgggatgcccaggtcaagggatgaagaatccgctgacccacaaatgtgcccttataaagaggtgcttcctctaaggctctgttctgattggctcaggggagggaagggcaggcctcgggactgcagagaaaggtcttctggggggcacagaaaactaaggagagaggtgagagggttggtgtgcctacctgagttacttcagcttccttcactgcccacctctcagaggtggccctccctgtaaccacctctcagggaatcctcccttctctcccccttgcggctgatggagaaagcctggggatctacatgttagaaaccaggcaggagagagcacaggcatgttggggtgcccctccccaccagtgggccgcggactagctgcatcttatgccacacttgacctgtgagtgtgcacacagcctgtcatgaggccctgggagcccacaccccagcacaggcagcagcctagggggcacaggagctcaggcctgagaggggcaggagctcagccaaggctacctggccagcctccagtgcccatagacaggtggctctggcagccacttttggaaaggaaaggaacactaaccagcatgtgtcccagaagcagccagcagcagaactggggctacactggcacctgcccagacatgctgttccccactctggaaggaagcctggcctcccacaatcatctgctcagctgatggtgcagcctagggtggttgtgaggattaaataggatcatgtatggaaagcactctgcacagctcccgcagacagcatgcctagtacagacagctgcgcgtagaggatatcaatgaatggactttggcacaaccaggtcttaattttcaggcaaggcataggtctgaaaggaagactagagactgaccagctgtgcccaagatacgtttagcaacaaagaacaggtgcaactcagcagcaagtaaggagctaccagaaagctgagcccaaagcagaaccacaggggagcttggcgcgggggcggggggggggtctccttgagctcccagaacaacagatatctgccattcaaacactgccctgactacatactcctggaagggtatgggggtctcagtcattttttaacccgcttgtgcttaacctggtgcctggaatcagcaagtgctcaacaaatgattgcctaccaaattaagtccaaatgcaaactctaaatggctttcacattatcccatattgggggattttgcacactctaccaccttacttgaggttcatcacctcatccccttggagttcttataagagagagatgaggagggcagggatgtgagttgaggaagaataccttacgttggggaagtgtgccaggtggggtgggttgctgctgtgaaacttggaacatggagcatttgtttcttcagtgcattaagctcctgctacaccctggaccctgatggggagtctgggaagcaaaactgtggatccgtcctcaaggagcccccagccccgtaaggaagatggacaagtcatctgcccactgtcatctgggatgatgacagacctttaccctgggttgacagggcacaaaggaggagaggagaagacaactgaagctgagtttgctgaggacaaggccagggacagtccggtaaggaggacagaagttacagactccacaccctgtgttttgctgcctgactttgcacttgctttccctatgcctggaacatgagtccctggtgagaggggaagcacagaaaacacacatgcaaaggcgcagagaccagagagggtgatcggtccagcaaggatgggaatcaggctcagacatgaggtttagctcttgtgaaggaaggaatgatggaggggaaagaggatcggttaagaggatgctgcagcagaaagcatgaggccctgagccagagcagtaggtacagagagctgggagcaaactggtattcggctgcagaattcggcaactatacatcccacacagggacgatgaggaggagacatgagctgcttggctgcagagatctctttcccagataagcttcggagaccaggccaccccaaggagaaaagtggaatgctttttgcaggcacccagggtttcacaaacagggagacgaggacctagagaggaggagcaattggcccaaaggcacacaacaaactcggaacagagccagagccatgcctgctgccctgtcctgtaatttgtgtccctctctcctcatccctcaccccctgtccaaatgcgagaactcagaagcaattgcaagaaacgccaactcctgaccctcgtggagttcaagcgggagccggcttggtgggaatgcagcaggacatttagttaacagcccctctggaatggccccggtccttgcactcctctttaaaaatttgtcttcaaccccgaaaacgaatcgagggaccttgtaaagaatagttattgacaagagagctgctcagggagcaccagggagccaggcccatgaatcagttcgctagcaaaatgagatttctcagacagccagggctggtgaaggcagaccaggagattcagaggaaccgcccggagcccaccctgccccagccccagccccacgcttcccactgtcctctccacaccagccctggacgcttctccatgcttgtctttaacaaacactaacttcagttcagtgtgctccccttaacagaaggcttcagggagtggggggtgggaagtggggttggagcccagttgagaaaatggaaaacacaataagtaggctagagaaggaaactctcatttgaagggtcaaaatgttctaagataggttggcagggactcctggagtctgacagtgcatttgccaggtgacctttagccaatatgtcactatttctgagccctggtgtccccatatgtaaaaacatgggaatcaccacttctaggcagtgtccactggcctccctgaagaggtcctgctattccaacacttgtatttctttttttctctttttttatttttccttttatttatttatttatttttgagacagagtctcgctctgtcacccaggttggagtatagtggcacaatcacagcgtgctgcagcctggacatcctgggctcaggcgatcctcctgccttagcctcccgagtagctgggactacaggtgtgcaccaccactcccagctacatttttgttttttatattttgtagagatggcatcttaccatgttaaccaggctggtcttgagatcctagcttcaagcaatcctcctgcttcaccctcccaaagtgctgggattataggtgtgagccaccctggcaacactcgtatttctaacaagagtcgtggaagataggaattatggctattttatagataaggaggcaagcacacaaagagggcaagtaacgtgccttcagcttagaagtgacctggcgggcagctccaaacctacctgctttctgctacatccggaggcaactgatgatgttggaaagtgaagggaatgaggttggagagatttttaagtgggagaagaagagggaagggtctctaaggatttgatgttctcaatagtggggtctaggctgtgggacccccatttaagtcacagattgtggatagtgttggggcagatggaagactatgaatatgccacagatgcttggcctctgccattgctggaggaaccagactccctcctccactgggaactccatccctagctgactatcacagcagacaaccatcaactcctgaaagcagagaaccaccagaccttcctgagcaaggtaccgagctgagcttgtttggagagctggtggcacaagcagagatgcctcatgtaaggagatgggcataagccagcacctgccctttcccttgggatactgtctgctccttcagcctctcgggctaagcaagagaaactgggaagtggaagccatcccctatggccctcatccttgccacatcggctcagtgaatgtttattatacccttgccacagatctgacagagtagtgagcacagaggaagtaggagtattaaataaccgctggcattcactgagagctcattacctactaaccactgtatagccatcattttattgacccctcacaataaccaagtaaggtaggtattattattatgcccattttacagatgatgaaattgaggctcagagaagagaagttacatgacttgtctcatgccacccagcaaataaatagtagaggcagggattcaatcccaggttataatagctccaagttctaaagtctccctgctgctccacactgtcctcctcagtggagtctggcagttcagagaatcattctgatgcagtggcaagagtgctaggctggattacaggggcttagtggggttctcactctggcattgactggtcatgtggccacgagtctggtaccacccacatctggagcaagccaagaccctcaacaagaggccaggagccagatggtccctccagtgctgtcccttccgtcttgatggttcttgggtctcatggtatgaagcctgggcacaccccgatctgccagttcacaccctcccttcatccatcctcttggacagttgttgtgtggtgggaggtggcagaggtgggcagtaacaagcttcaggggtccccagctattctccaagctttgccagctccgccatcctctatatggtgctgccattggcaggtgctcctgtgggtttggggtttgctgtgtcggaggaggctgggcattgtgaaggagaaagggaggatgggaatggtaactacccctttgctgtgtgtgctagagaggcactgagtctcagggttaagacagagctggaaatttcaagtcgtctatcctctgcccacaaggagtgctcaggcgaaagaagagaaaaaggatctgtcctacagcagctcccaggataagggagaaaacaagacactggcccatgaagaatacccagtctgatgggggagactagtcataccatgaagaaatgatgtcaggcattcagggaaatatacaaataagtgcaaagtaacctatgcatgtaatttgagaagaggaaatggagcaaatgcagaagccaggcagttcatcagagaggtagcctggagaagggtggaaatggtgtgaggagaggtactagaatgggcccaccagatggctgggatgtcaaaaacaagctgaggattaggagcagggatgcatttagcctgactggagggatggagtcttgggggcctggctgagaggaggagtgggtgcgaggaggcggaagaggtgaccctccctcagatctcagagtctggagcagccctgggcacctccagtcacagtgtgaactttcctgggtctctgccctcctgtgagatgggtctggactaaatgttctctgagtgtcctccccattcagggcccaaccataacttgtctgcaaagcgggttcaagcatcaccatcaccagtgtctaacagccctccctggccactgagcagggctggagcacagagggggcctcagccccctatgttaatcccagctctggagcatgaggcagacagctgcagagtcccctgaggatgaggccagcagaattagagccttgtctctgccaccgccttcttgtgtgacctcaggcagcccctgcagccctctttgggccccactgtggggctggaagggccctttccctcttgaccttctgcaattctagaatggctttctttctcctccattacaaacatttccaacagccctcctgtggttcccatgggacaggggcactgggctgcttccacagcttctgcaaggtgggaggtgagggaagctgccagcgaggagagttgacagggaacaaaggaaaagtgggcatgtcctgggagccagccttcatgccttcatctgtagcagagctgtatggcccaatctctgccctgagggttgaccccacctgacagacccttccacatccagacacagaagaggggaaggggagagagggcagaagggagcttagaaggttgaagatggtggaaagtggcaagggaagggtccctctttcctgcctctgccctcctcactacccgccacctccatctcaatgcactctgccactccaagaagcagagagcccagcccacccctcccctggtggggtgcaattcatcaacattgacgggagcctggaagatatcaggggagggccctcctgagcccaccctctctacacatagacacacttggccacaaagtgctccttccaaagtccctccctctctaggctcagttccagaattatcccttgtgggatggcattctgccaaggaaagggcaggccccataggggtgggagagctagaatcttgttagcccactgggcagggatcacatatcccagcgattggggagagaggagaggagaaggaggaaataatgctccagcagctgcagatcctcgagatctttagtgatgccagggccacagggcgaccctccaccccagaaaaccccactccaggaagacacggcaaaacatcaatcacacctggtgacaaaagtgcagccattgtcaggagacaggagatgggctctgtgggcactgggcacacagggcacacgaatgcacacacactccctgcatgctcacagggcacacattgtaaaggcacactctctaagcactctgctcacacactcgccacactcacagggtgcaaacatgcaggcacacgtacgcacacccaccacacatgcgcacttgcatgtatgcatgtgtaccctggctattggagccacacagctctagtacagtaataaccagaggcagctaatgggaaggcggaggtcacaggggtggctgccaaactcaggcgtgggcccaatggagaggggctggagtaaagagagcagccctccagactctagtgtacccatggggtctctgcagaggggaactgctgcccatctgtgtaaatggccttcagaggtccttactggaataagagcttctcagacggaggggtgaccaggagcatatctactccatacttaaaataatacataaatagtctcatggcactcagaagaatagccatttgcatgcaagccaacaactgagttaatgacaaagattcttatctgttcattaaagcagactagcgggctctctatgtgaaaacactttgcagttaaagggactatgttattaactctcatgaaatgatttatttggagctgatgccaggtgagttgcaacctgggaacagaggccctcattcaggggtgcccctggacttctgggaggaaagggacagagatcctggagagatgattaaaacccttcctgtggatggagagaggcctgtcggaggctggctgggacaaaagggcacctcatgcgattcaggttccatctggcctggccgtggaaggcagcagaattgatttctccctgagcttcagttctctgtctatgaaatggggataaaatagcacctacctcatagggttcttgtaaggaataaatgagttattgcctgtgaataacagaaaatgtctggcccacatctcacctcagtaaatgcaagctattattttatcattttccaaagaaagatgaattttctaaagggatgtgacagggagatctgatctgatcctccatctgatactctaatttttaaaacatttttcattttttggtttggtgtttagagtcaggacttccttcttgaactaagtcagctctcaggggtacttttgagaagatgttagaagtaccccaaagaaagatattgatgttttgctaatttggggcaggaggagttcaagccatcagtttgacaattcaaaaaagagcttactctaaagtggtgtcaagggtagctacatttaaagcatccttcaagacgggttttttcctggaattactctaaaataaggggtctgaactgaatctttcgtgtagaggggaggaggcacaacaaattaatcttctttgtccaggcgacactaactggggataggaatgcttaggcggggcaggccctggacactcagctatagaaccaggccttcggctaaggcaggccagggagcttacaggccctgcacagccccactcccactcctcagtcaggcacagaactccaaggaccatggtgggcctcagcttctagcccagcagagatgtctatctgcagggtggagataaggcctgggccctgcagcagggagcttatcacagccagcctttctctgggctgtgttcacaagctggctggctgccacctctccccactccatccttccattcctctcctcttccaagacctgcatcttagtccccctgaaggggctgtgcactgggacagggactaccagacacaccagcctgggccccttccagaggaaagagcttctgcagtcggggcaaccagggcaagagaagagagaggagcctatacccttttcagagctgggtatcaccaggaattgccactgtctctgatggcagggagtctctttccatggcaagacaccacctgggaggagcatgcctcatccatgggcctcatctgcaaatgcttactccttggtattgatgcagcgcaggtgagcccaaaactggggcttagccctggagggttcttggctttgcccaggaaagaattcaagggtgggtcagtagtgttagacagtgacttttactgaagcggcagaggtactgctctttgccaagcagggcgaccccataggcagtgtgcccagagtagcagctccaaggcagggtggcagtcatatttatacccactattaattatatgcaaattaagggcaggataatgcagaaatttctagaaaaaggatggtaacttccagggcattgggtcgttgccacgaaaagaggcagtaacttctgggtgttgccatggcaatggtaaactggcaaggcacactggtgggcatgtcttatggaaaggtgcctccctttccaccatgccagttcaccacctcctcccctccccatccctgttttagctagcctcaattcagtccagtgtccgagccccacctccagagtcaagtcccacctcctacctcaggatgatgagcctcctgggagggctgcagtccctggtcttgggggtgtccacctgtatgttcaaggagatgcacagactttggctgaggctgccagatcccagggcaggacccaaaagctgtcttctgtttgtctcctcccagacccattggcctctgaagtcagtgttgtggaaactcacatcctgaagatttgatccaggactggaggaccagtgggaaaagccagtgatccgattcttgcttggctatcccctcctcagagggcccttctctgacccctctacccaaaatagcagccctgagtcactctccatccctccagcttgtgcccttgtcctgcctgcacccacccccacctgacacccgattttgttaaatgctgtgtgtctcccccactaggatgaagggctccatgaggacggaagccttgttttagtcaacactgtatccctgcatctggctcagggcatggcacacagaaggagcttcatacgtgtgtttaattctgagttggcggggatgtgagaaggggcagaggcttcactcacagggagctggatggcccactgagcatcacaggctggcatgcaccatcagtgagcatctccctctcaggtggaaagggagcccaacatagtaagttcctggggcccaaggcctccagcccagcatgccagtttcatcctgggttgccctgggcctgtgaggtagctgagaggactcccaggctgaggcgggcccaccaccccatcaccaacaatctgatgacagtcagccattagctgggggtagtgggagaacggtggggtgggagactcacaggcagggactcttccctggtcagaaacactgggaagggagggcatggccgaggggagggcattggttatggagtctgaattcaaaccctggagaagggctctaactggaggtttgtgaaggacatcagggagtccacagccccctgaaatgattcacaaagggaatgtgggtgtgcacacttgcacactgacttttctgaatttgattcatttctctaagtggccttgacactgaacatattgaaaacttgaggtaaggtatagaactgtacttaagtcacagcccaggccctcctaacccctaatccccgctccagggtcccaactggaatcccgccctaggtcacacctgaagggggatccttttaacgtaaacaaggccactcgcttgcctcagcaggcagtggaagttaccaccaaaataaagtgaaataaaatctctaaccccaactagcccataatgcattcccagacaatgtggatatgaattggagcatgacgattctgtttgggatactctgtactccccgtccttctgctggaaggaaatgaatgtgcaacagcttaatttatccttcgctgggaagccatggaggctgggaggcagctcctgtgaggtccaatcaaccctgtagaggattcctgcttatcctaacctgcccacaacccacagtctctgggcaggcgtggcaggagccgagctctacacccagactgggagaacccctgcctttgattgctcagactcagcctcctgtaaaaagacctggacgaccttctcacccagacagctttccaggggttgggggcggggcagggaaggaatgaagtctgatgggcaaatagatggggaaggctttagtaagggttcaaaactttcttctggacaacataaggagaactcatgctggcaagaggagaaatctagacccccagaaaagacccaggggcaagaggggcctgggaaattttagaaaatcacaaggattgtcccactgagctcagtgagcaagctgggaatggcaggagaggagagacagggcaggtaggcaaggcagtcctaagggtctggactttatcctgacccagagtgtaccaggagagacttttccaaagggagtggctcaagaagattagaccaataggttttagaacaacagatatgatgcaggagaaaggtggaaggacagggactaaatgagatgaagctatgctaggtgttaactgaagccaggaatggaaatactttcccaaacggctttttcaggattcccaaatccctcatttcaattcctcaacaagatttcctgacatgcaggcttccaagattcgctgtgccctgggacagacatgtcatctagcaagaagaaaggactttgaagttcaacagggttggatttgaatcttggttcttcaccttatttcttgcatgtgactttgagtcagtatctgttacctaatctgtaaaatgggggtgaagttgactttttctaaagatggttgtggagatcagtgatcttttccatacagtctaaggcacataataagtgctcaataaacagtgaacatgagtactttgtctttaaattcctagcatgtgcttgttagtctggaatcaccaatccctagtaccgggaggaatccattccaatattggaagaaacaagacccagagcagtagagtgacttttccaaagtcctagagttttattaataaaggggctgggattcaaatccagctctcctaaccactgttccatcttccatcttcccagtagtctcactcttgggcagacttggcctttgggtgcttcagggaaatgaccacccttcatcatgctttaagactgtgaggatgtcaggtctgtagccaatgccttctcttcgcctctccccagatcacagcctcatcatctccctgcctgggagcatctgtttccaagtgccctcaatgcccccaggcctggaggagcagaacggggctgggactgcgcagtggcgtgggcggatcttgggggagggaaagggctgcaccgaggaagggagagatgctaaatgttcgccctgtcaccactctctcccctgggccccagcgcagggctgagggatgggcctgtgctctgtcagcagccccggtccacgatggatgtggaacctgggaggatggtgtcagcagcacttggtgagattcatttccccactgctatgggagaaaaatgtggccttcgtgtcatccatctgctccgcagcgaagtggtaaacaggcaagccttgcagagagcagcctggagcccagcccagctcgcagtcttcctacagggctgggaggctgggacaaagcactgtatccacgtccctgggcccacgatggcagggcttcttggggaggacccactagctgggagcctttggcgctgccacatgcacctccaagaaccaaaagttagaaagtcaggtgagccatcattccatatccaattcattctcacctctcaggtggttccggagaaaaatggctgggatcccctgaggttcccgaagccagcccctctgctcaggctgtttctctctccgcatcagtcttggaatccttcccatgaccagcccacaagtcacttcctccaggagccgtcccagatcctcccagcctgatctcagtgttcctagtggttctcttacctttggattgggctttaggtagttgaatagcttttatcccacctccaccccccagagacatttctgaactgcctccctgtcagcttcactgatagcgagttatctgcattccagctcaatcaaggactgggctggaacacaaagaaagccaaagttcaccctttcgccccaaatcagaggccgcctcctagaagactgtatcaaatactcttgtcaaataaatgcgttgtgcttccaggaaagcaactaggacgcctccaggggagttgactcccccatctcctgacactccccatcacctcctcccttccccaccatcacgcctttctataaaacctttctcaagtccttgccaacagtccctccatctattctctgcaatgtcaaagcactttcatgcctgcttgccctcttgttctcaggcctcactgactaagttggttgctgctgtgatgatttcccatcttacagatggggaaactgaggccagtgcagagatgagtctttccctaagtgacaagaaggcaacacaaggattaggactggatggattcaattaaaagcctcagaagcagtccctttccacatttttaatgttcccagcaccagcataaggcccctgctggatcttttactctgtttccccaccccttgttctccccaggataatgacgacaccctcttacccagcctccctgcccggctctccccatgtacagcctttagctgcagagccatctttctaatctgtctctgatcctgtcacccctcaaggaggctgcctttctccctttcccctgccccttataggtgtcctttaggggagtgcagagatgacatttatgccaccccaggtgggtggaccttgtgggtgctttcagtctgctccatggaacaccagagccctccccacttccaggactctctgaggaaatgggaaggacggctcatccatccagcgacacacaccagactctgttcaaagccctggtcttgtctccaccttttatcccccagacctcctgccccatggttcaccagaagaaagggcatgtagaggacaatcaggagggctgaatcaatccttctccttcaatgcccctctttagtcagaggctgcagagaccatggggagacgaagatgatcacaacccagcccagcccccaggactcaccccccatcccatgtgacattggacaaacccctttccctccccgtctgttaagcaagagagaagaacccggatcttaacttggggaggggacatggaccccttacacaccatccaggggagtggttgatgcaatgactgcttcctgaccatggattccccttaaagctccatggaggccacttttagatgccttttctagtttctgcatcccccaaacaggccaagaaaaagcagtccctccctgtcccgtggcagccagctccggaataggctaggggagggggcgtttcacctctcatccctcacgtggggttagtggagccggcagggccatcactcactgcgccaatctcttgctccagcgccggcccaaccccatcccctcctccagagatttgtcctccagcgaggacagctcatctctctcacccccagctctcagcaggcgtggctgggtgagagcctgggaaggaccctggagaccaccctccaacttggcattctgcctgggtcctcctgccctcagcatctcttcaatactcagcccctccctccggccctctcctcccatcccactttcagccaaggaacattttaaatgaattcaatttaaaacttcagaagcaatcccttcccacatctttaaagttcacggccccagcatcagactcatttgttcgagatttcattcaacaaggagctcagtctgtcacctctttgctgaagcatccaagctgaattgtggcactctgcttggaagtcctagaataagcacttccttgagcaccctgtcttcagggtgagggcctgagctctggcatctctgcctctcccactgggctgtgaaccactcgagagcacacaccctctggattcattttctaactctctacctgtgcctggcatacagtatgtgccatggatggctgactgcctctgctgattggggatccactatgtgcccagcatcgtgtaggcccaaagggctggccaagaacaatgcatctagtggaggtgacaggtgcagaaaccaacaaaatgccgctctgaccatcagcacaacaaggtgagcagcccccacccacatgctgtgctctttatccacttacccacaactccagccacattggccacaccctctagagctgaatcaggccccccaggcagatgaggagtccagctctcctacattccaccactatcatcactaccactctccagaacattggggccagaagagagagcttagtgcaagctctgcaccttgagaggagagtaggaaattctctctggctgttcttataaaggatggggaaggcctggcaaaaaggggaagcaaagagaaccattctctcactctgccccgaccactggcttactttggttagagaatattatcgcaaatgccatggggacagcaaactcactacagaaaacagctgtagccctcagaatgcatttggaggagctgctttgggagatcttcccagctccctgggtctcctcctttagagagcttgcaactacagcagaagtctagacagactccccattgtacattcggtctcagttcaagggggttcaaggaggagaactcttcagatctaggcaaaaggggcccctgcccggagttaacaaactttctcaaaggaccagaaataaatattttaggcttgcaggccatccaggccctgttaaaattactctgcccttgtacctcaaaagcagccttaggcaatatctggacaaatgggtctggatatgctccaatacgactttctaaaaacaggcagctgtctgctggaactcacacacaccacacaaacacacccttaaagaacatggggtgcctcctgtcactcagaattattatgttcagcactgtcatgatgcagcctataatcctaaacatctactttcatgattaacactgttcaggccccgggaaatgtttttccacatcttttgctctaggttctcaaaagaaaagacaacagagtcagaatgctgtgaagatttctgggatctgctgctggtgacatcaggctccacttcagaatgttgagagggtatgcgcagcagaagctcttagataagaaaggagataattaattagcttttcaaatccttgctctttgacagcatgaatgcaatagattgttgaaaaggtatcgtttccaagtaatgccaagtgtccattctctagctgtcttcctgttccaatgcatggttctggaagaactcatgagttgtcaaattattatttgtagcatttactatggttgacatggcagctgagaaacatttttctacattagcaattcgtatgaatcatatggtacatacgtaggtctacacgtaaaaagtacgatgctgattgattacatttaaaaatggcacatttcatgttacagttgtgaacagttttatctttataaaatatttaataatagttaagtatgttttccaaaaaattaaatacaattttagctgtactcaaatggtttttgtttaatttttttatattcattaatcatgatgtgaattacacctttcaattttataggtgattttgaatacttttttgaaagtatatgtgagataagtataatgtttcaattttgtactatacttgaacttaaatgtttaagaaaaataccttcaaattttggacactgaataagattgcattttattttctaatcctttacctgggttgtccaatacagtatctgctgtttacaaatggctattcagcactggacatgttgcctggcatactgagatgagctgtaagagtaaaatacacaccaaatcccggagacctagcatgaaaaaaggaacataaaatatctcattaatagtttttaaatattgattccctgttgaaataataacattttgggcatattggactgaatacaatatattattaaaattaatttcacctgtttctttttatttttttatgtgagtcacaactagccacatttcaggcttgcaggccatccaggctctgttaaaactactctgcccttgtacctcaaaagcagccttaggcaatatctggaaaattgggtctggatatgctccaatacgactttctaaaaacaggcagctgtctgctggaactcacacacaccacacaaacacccccttaaagaacatggggtgcctcctgtcactcagaattgttatgttccaagttatatggagatcctcattttaacaaaattgatgttaaattttaaccaattaaacataatggcaagaaaaataaattttatggagtaataatttaagcattaagtacatctatttttgtgtaatttttattattcttttttgagacagggtctcactctgtcacccaggctggagtgcagtatcacgaaaacagctcactgcagccttgacctcccagactcaagcaatccttccacctcagcctccctagtagctgggactacaggcgcataccaccatgctcagataatttttgtatttttttgtagagacgggtttttgccatgttttccaggctactctcaaactcctaggctcaagcgatctacctgcctcagcctcccaaagtgctgagattactggcataagccaccgtgcctagccaatttttctgtgatttttaacaccaatttattctaaatttctcatgattctgacgtcattaaggcttttgttgtacttgaggtataatttacatacagtgaaatgcccttattttaagtatacagttgaatgagtttggctcagtgtatatacaccatgccaacattccagtctaaataaaagataactgcattgtcccaggaaacacctcatactccttgtcagttaaactcacctcagaggcaactgcttttctgatctctatccccctatattctttttgcctgttcttgaacttcatataaacaggatcaagcattatctagtctcttaggtctggcttcttttatgtgcctttctattattactcatctaaacatcagcaacccgcaacagaacaccagcacacatacaggagaaatttaattcagttgtcttcaatatttgccaccaaagctttatacatatttttcgattttgtcattgtgaaggtatacttgccaagggaggtggataaaacatattttgtttaccaatctgcttgctgaattaatgacttgtaggtatttagacatgtggtatgtgagcctcccttctgccctttgccctgggccccacagatggtaggtaggcatgggctggccaaggagggagagagaacagaggccagtgctgcagaatagcctccaccttccagcccaggagcctggcctgggagagcggggcagaggaaggggctctggagtgccaagctgaagcaggcactacccattccattaacaaacctttattgagcatctagtatctgcccacagtgtgctaagttttagaattacaatgaggaaaaagtaaataaaaagacatcccctctggcttcatggagcttacaaattagaaagaagagacagatattaatcaaacagtcacatccacaagggagaaaacttacaggatccagcacaaatttccttgactgatattcaggcctttattattgctgccctcagtgctggagatgcccttctcactcttgcacctacagaagtccacattcattcagcaaggcctggctccaaatgccccaccttgagaaacctaccctgtcatctgaatttgtagccccttcccctgagttcccatagcaccatcctgtcacccctcttatcctgtgcatcatgttagttgggcacctttgcctctgcatctgtccctcccactgagaggtctctggtatgggggtatgggaatgaacaaagaggtgatgtgctttaaggcctgctttttttttttttttttcaaggcacgttctcactctgttgcccaggctagagtgcagtggcgcaatcacggctcactgcagccgtgacctcccaggctcatgtgattcttccgcctcagcctcccaagtaactggaaccataggtgcacaccaccactcccagctaaatttttatgtttaaatttttttgtagagatggtgtctcactatattgcccaggctggccttgaactcctgggctcaagcgatcctcccacccttggcctcctgaagtgctggaatcacaggcatgagacaccgtgcctggaaaggcctgcatttgaggcctggctctaccatctcaaagctctatgggtttgcccaggtgaattctcacccctgagtctgcttcctggtctgcacaataggaataatgctagttactccataccgtttttgtgaagattaactacgtctacaagcacatacaaacactgagtgggttagtcttcacacacacacacattcctcccctattcatctgcaaggcccaggacctgctgaaaaaagagttgtccaccctcacctggccctgtagcctctgcatccagggctcagggttcctcaaagcagatagacagctaggacagggacggagagggacagagacaagctgaaggctcagggcccccaggttccctggctggaagagcaactggatgaattggtccccacctgtaacgtgactgagggtaggaagaggtggctcagggccagctgctaggatggaccctgtgtggtgacagaacaggttcagagcagctgggatccaggtggggactgccaggaacaggcccaggatgctggaccggggcccagagccgctttccaaggcccattttctccccattcccagagtgtggccaccacgctgccaacagtcctggcagcccccagcccctctgtttccagagcagcctgagatgttgccaagccagctaccggtgggcagaggtgcccctgcctgagctctgagagtaatacccttcatccatttcatcaccaagctccaggctctcaaatcacgagtggccctggagcaaagtccccacccccagacagagaaggcaggacggagtcctcatcttgaactcactgcttcctctctggagcttcctttgacctggctggtgcttcccctcttctcacttataaaaaggaaagagtaagctctgtgatcctatctcccacaactctgtgactgtaaaataaggtgactcaaggggatacgttttacacacgggccaacttactatgtgacctaagtcaatgtgttgcccttctctgtgccttagtttatatgaggcagcactaggacaaagctaatatagtgctccctgaccccatctcagagaaaaaggagagcacttcttagcagacatcaagttttcttttttctccttagagaaatcaaggtggcttgatttccacctcccatctccatctgtccagggagggttcccaagtcctggaagaagtccagagggcccctatacggaaagatgagtccccaaccagagcccagctcccctaccagcagccaggctcagctgggctcctcctgcccccccccatgccaattattactggccctgggcagctcctcctggcagctcagacctccacaccttgcccagctgagtctctcctcctatcattccttccctgctcctccacacctgtcattatttttccaaaatcatttcatctaatagggattcctcaacagcctgctaaggcccaggcactgaactaggcatggggataccacataaatgagacacagcccaacttcatggggcatgtggccagaatttacccccagcgagcccagaaagatgtgcttccttacagatatataccaatagtcaacatttatttagtgattaccaggttccaaggacagagctgagggatttacaaggatcatctccttgaaccatctccgcacatctgtgcactacagatacacagtgcactgcacagtagggctctgccctaacactgatggtggggaaaccaaggctgggtagaggctgtccagtgcaaaaacaaaaacgtggggtctctctgatatccttccccattccctggatccttgccctgctatcattcacgtcccaactttataataaagcaaataagtctggcccatgagatacagacactgaggctcagagagactatttcttgctcaaggtggcaatgtctaataggggcagagccagagttcagacccagtgtgtcgggcattaagtcgcttactcttcgcctaccaccttataccatgaccacatctgggcaatgaggagccaccaagtatgcctgggaagacctaagaatgctgaggtgactttcagacaaggatggaccttggtaggtgaataaggctttgacaggcagacaaggaagaaaaggcattccaaccaagggatagtgtaggcaaaggcacagaggcacgggagtgcctggtgggtctggggaacaccaggctcttacgtatgggcagacccaaagagaagccagaaggaatggggaacatgcaaattttctttctttttttttttattatactttaagttttagggtacatgtgcacactgtgcaggttagttacataggtatacatgtgccatgctggtgcgctgcacccactaactcgtcatctagcattaggtatatctcccgatgctatccctcccccctccccccaacccaccacagtccctagagtgtgatattcctcttcctgtgtccatgtgatctcgttgttcaattcccacctatgagtgagaatatgcggtgtttggttttttgttcttgcgatagtttactgagaatgatgatttccaatttcatccatatctcaccttttctttacaagtgagaggctgaggcccaggagagctccacccatcaaggccaagttgccaggttgggacttccactctcagatcaagctacctttctgtttctcccctctttcctcctttctttgcctcttctccctgttctccttcactctctgcaaacctttcctccctcccctctccccttcctgccactagaaccacctgcaggaggttcccaaccttctgccaccaccaaggctgctcccctttctctatccccagcctcctagacctggccttccatttgcttccctactacctctgatgggctttacccataaggcagagggtggagtgaggttgtgggaatgattttcctagtctgtgtacagggctcaggccacaaactgctcacccacaggtaagatacaggtctcagattagccactcacttcagcctgcttcctgatcatgcacaggtaccagtgccctgcacgagtgcactgtgccctagcactgggagtgggcaagccaagcctgggtaggggctgcccagtgcaaaaacaaaaatgtgaggtcccttctgatggctccctccctttccttgccccttgccttgctgacattcatgtcccaactttatcataatgcaaataattctggtccataaaaatgcaaattgtctgcagaggaatgcaattgattgttgtcctgtggatgctgactagatcactaggctttgcatctatctctctgtaatttcgtgtcagcataccgtatctgaccatatatgggaggtacctggaattctgctttgaacaggttgtaatatctcatggagtccctcactaattagtgagttaaatgcaatctttaacacatgttcattttatttccatatgagagtcatgattgtactttttcaaaatcaattattatttaatgctcccaagatggcagtggccagctttcatctgaaaactgagatggttgggattacggacatggtgccctcagtggcaggggtgtgcaccccaacgtctggctggcccagcactgctgcttctaggtagttgttcccttgttatcatccctcccttaatgaagcatttgcttcactaagatttctttttttttttttttcaaacgggagtggaaagacttccgtgttccctcctgaagggaggcctcagccccacactctgagcagaaaagggcctttctcttcctagtcatacctagcccttgagtctcacagaggagggctctagaggccagacaatggggactcaggatcttctgctgggggtcctcagtcagccattcattcaagcagcactaaccgagcacctactaggtgccaggtgcgctgagaatagagtccaagcaaaagggcttccagctcaggtctctctcaccttcccttggtcttgactcatgactcacagcccaactggccctggcttcaagtggggccttatggaaccagagaggccctctgtgccaaccccatccctcccagcaaacctggccgtaagtcctcccatgggaaggagggctcccataggactcccgggagctgacccacctcactgaccaccctcctgcccccaagggaaagccttctcacatgacgcctacttccccagggaggaaatcatcacctttttccagcgaaggtcctggatctttagagtctcccataataattcagtaaaaagagcactgggctggagcaaagttggaatcctggctcttccaccagttactcgctgtgtgaccactccaatttcccatatggaggatggggaccacggcacaatagcccctacctcataaggttgtgaacactcagtgggaccatgtaagacatcagagcataagcccagcacacagtaaactctgaataaacgctgtctgctattacagagattattaattagtaaatcccgcccccagcccccataaaaggctaagtgaggtcagggctgttaatttcatctcgtaaagtagcaaattgaggtccagatgacaaggagattccaaaatgtctctaaatgtaaggtcaagtacaaagccagaaaacaagaacctggggacaccccacctccacctccacccccaccactaccaccagtttgaattcctctcaccaattcctggggaagataaaaggatgggacaaccgaatggcagatggggcaggaggaggaggctggccacaaaagcctgggtaccccaaatcccaggagtcctgtgcccagtttgctgtatcccccttggagtagttgaggggtcacgtaggtagcacagtcctcctgggacttcagcttggagctccaggcactcccaccaggggcatatggagggtgagaggcctctccacctggggctccccatctccgtccctatcctgcactctctgagctgcagcagccagcagggagcagcaagcaggtgtcctgggaggcaggtaatgtgaaagacttcatggaagttcattaaagagctattagaggctccactgcagacctgcagatggatggatggatgaacaggagagtggagggagatcttcccaggagaccacagccccacctccccctgctgcagcccaggctgtacccccacttttcccccatgtagttttggaagagaggaggaacaggaaggcatttctgttgataaccaagacactctcttctttcaggcctggtggacctggcagggatcagggcgaagggttccaaaggaggagagggtcagagtccaagaaggtggggcttagatggatcacaacctattctggcccaagcatcgtgccaacgacaataggtgaccttcatgtggcacttcctctgtaccaggcactggtccaaatgctttactgtgctatttcctttagtcctcacaaccattagaagggagcactgttattatcctcattttactgatgaggaaactgaagcacagacaggttaagtaacttgttgaagccaagcactgtgtgtacaggaccccactgaattattctcacaactctgtggtgtaagggactatctctatcaccattttatagacaaagaaacagtggctgagaggggttaagtaacttgcataaggctacacagctagaaagtagggcagtgtgaattagaacacgggagttctttagcctccttcaccccaagtttgggttcatgatcaccatatcacattgccatcaaccctgaaatgaaggtgcatgatcaccagtcccattttccagaggaagaggccaaggggtgaagtgagtagcccagggcacacggttagtaaccagggccacctgcatctggactggagcacagtctgtctgtctccgcactccaggacaccaagcactccttccacccacacacatggaggctacatcttccacatcaggccaggcaccccagaataagggactctatttccagaatttctgcagtctctagctgggtgtctgcgcagtgtagagaagatgcctcctcaagcacagctgtctaaaaacggactcagcacttcacaggtagggaattcctcccctggaaggcctgcatcagagactggagggcccggggacacttggtgggcttgctggtgggtgggggcctgttttgagagggccttggtggacctgatctcagagaaacttcaaattccacccagttctcaagagcttcccgtggaatccttgactcttgggagccctgctcgtccccttggcacctaccccctgtcctgggggtctcagcctgaggtggacaagagacctacacggtacactggttcccggtctcgactcccctgctccccttctccagcacttggtggccctggatggagggcccttccaccctgggccttgtgtgtttgtccattttgcactgttataaaggaacagctggcgctgggcgatttataaagaaaagaggtttatgtggctcatggctctgcagatgtacaagcatggcagcaacatcttcttctggccaggatctcaggaagctttcaccatgaaggaaggtgaagggggagtaggagtgtctcatggtgaaacaggaagcaagacagagaggaggaggtgccaggctcctttgaacaaccagctctcatgtgaaccagcggaaagcaactccctcagtacccagtaccctggggaggccaccaagccattcatgaggggttcacagcatgacccaagcacctccccccaggctccacctccaacattggggatcacatttcaacctgaggtctggaggggacaattctctaaaccatatcaccttgtctctctgaggggagcagaggatcccacctcaagtccccgcacacatggagccatgagagtccccaccaggtggaggcagccaggcccaggacactcagaaacccacccccacgtgcacggccccaccctggcgcaggatgaatgtgtggcaggcccgtgaggaaggccgcctgctgttgcccgaggcggttgtctggaggaagggcacaggacacatgggagagagatggagattgagaaatggggggaaattaaatgacagagagacatagggggatttaccaagaccgaaccacaggaaaagatagagagagagccagagggcgtcccaaaggcagagaaccacgcagagaaacaaatctacaaatccaaatataaaccttgaggaagacaggcagtgagaaaacagggaaaagaacagacatagaaaaacggaggaagatgggaaggggtatggcagggagtcggagagaacgcgaaattccaaacgaaacacagagaccaggtgcaggagagaaggtacacagcaagggggcagtgaggaagaaaggagagaggaagcagagcggggaccgcaggaggaggtggggcctggagggagccgaagcagaggggcccagcacccccaccccaccctgatcacacgctgcggcatatggctcctgatttcctagaggcacgagagtgataaccattaatctctataaataattttaccaacccaggcttctaaatgggttctctgtgtctgtgaaagcttttaaaaaccatttgcttggtaaacatgcaggcagcaaacaaggcctctccctaccagcaggagaggaggctggaagatcaattcggctggggggataattagaagggagaatatgtgcgcaggctcgccctgctgcctccttcccacctggggccacggaccccgctgatgaggctgctgagacccctggctcttcaccctacttgcaccatattcctctcttccctgctcggtgggcctgggcgggacaccctgtgggcatctcagccattcccctgtcctgatcccacagcagggatgtttttcttaaccgaaccctgagggaaggtaagatcttggctggtattcctaagcatttaggaagttcttcttcatctctaccccgagttcctcatgcttttccatgtcattcagcctttagacctgacatgtcaccagttacagctgtcttaaaacagactggggccagacagggtggctcacgcctgtcagggaggactgcttgagcccacgagttcaagaccagcctgggcaacatggcaaaaccccatctctacaaaaaaatacaaaaattaggctcacgcctgtaatcccagcactttgggaggctgaggcaggcggattgcctgaggtcaggagttcaataccagcatgtccaacatggtgaaaccctgtctctactaaaaatacaaaaattagccaggaatggtgacacatgcctgtaatcccagctacttgggaggctgagacaggagaattgcttgaacccaggagacggaggttgcagtgagccaagatcgtgccattgcactccagcttgggcaacagagctagactccatctcaaaaaaaaaaaaaaaaaatagccgggcgtggtggtgtgtgcctgtgcctgaagtcccagctactcaggaggctgaggtgggaggatcacttgagcccaggaggtggaggctgcagtgagccttgattgtgtcgctgcactctagcctgggagacagatcgagaccctgtctcaaaaatttaaaaaataagcaattaaaataaactgggcagcctcccagataaggagttccaaatccttgactctaaaccccaatgttcagtgctggccccaggcccttcttccaaatatgatggtttcagggcccctcctggccatccccttgacacactccattttgtcaaagtccttcccatgtctcatactgggaattggacttgcctggaaaagaacagtcttgccttttagtttggctgctgtattaacagaggccaggagaatattagttatttgggcatctatacctccccctccaaaaacataactgctgcctgatgttagctgtgtgtttgctgaagcccccaggtctttgtcactcctgctgaccccagccttgactcttgagacccccaaagcaggacttgccctttctttctgttaagcttcatcttggatgctggactttgctacaatcaccaagatcctcttggatcctggactttgctccaatcaccaagatcctcttggatcctgattctatcatcgggcttattcaccatccctctggttcctaagcaggctttggtggctgggctccagagcattgctgggaacactagtgttgttggggacagggaactcttgtttgccctgagtcttcaaggctgatccctttgtgggctgccaccaagccctcaattcatgctgcacacaatcgcccagctgcacagagaacatcactgggggccccagcttcatgggccatgctcccacatggcccaaagtgatccagtggtgctgaggctcccccagccagcattccttgaccccccacccaagccccacaattccttgactttaagagcttaggttaaactggcccatgagggctccacatagcaaagagggggcctgcacaccagctccaggtgcaattaagcaagatccttcccctccgatccccagaggccttggtgggaatggtccaggggaggagggaagggtaatggctggacagatccatttcccagtgctgatctataacagctctctaagccaggcagaatggctcacacctgtagtcccaagtactcaggaggctgaggtaagaggatggtttgagctcaggaggttgagtctgcagtgagctcagaccccttctctaaaaataaaacaaaacccagctctctgtgcaaggccaaagatcgcccagagatatggtagttgtggcttcccaaactctgcctgcatcaagtcgagagaggaggaaggagcccaagactccaccagcctttccctgagtcctgtgtccagcagaggccagggccaagctggaagtgggagatgaacaagtcatgaatagaattcatcctggattgactctgggaaaaacaaatcgcctgacaatggacattttatttagtgacctgtatagtgactaagactgtgaattttgtgtttgaatgcagttctgccacttacctgctgggtgatcctgagaaagttacctaaccttcccaagcctttattttctgatgtgtaaaatgggaacactactgcctccttacaggggcatctggccattgactgagtgcccactgtatctagggagtcacaggaggactgcttcatttcagccccatcgagcaggtgctataggtccacatccatcttcagaaactcttgcaaccagatttttggaaggtaattcggtggatattctgtttatttcataatgcctccaggggtgtgccctgtaatcaaatgcatgaatgtatctgcagtgaaatatgtgactgcacacaaagcaaaacaaataagccctatatgtttacagcctcatgtcctttaaagtcaagttttgtcagcaaatgagttttgaaaaagtttggttttgggggattgttgttttccaaattgtgggtaagagatgtggacctgagttactgtccccactttatggacgaggcaatggaagccaagagggcttaggcaaagtgctcaagaacccccagcgagtctgaacagggcagacttggagctgaagtctgtctgactgtctgcccgcctccaagacctgagcccttcctgggcactcaatataagattttgcctcttgcctgctacccagtgcttttacgtccagtctctactttgatccttgtaacccctgaggggcaaacagggaaggtttgatttctatgaatgaggcattaagtcctagattggagagtgactttctcaggaacacaggatttgcccttgtttcttctccctcccttcctagctggcttctctttccaacccagaccttttccctggacagcccctcatcttccagacctcagtaaggccgggatcaaaatcaaagatccactgcagcttgagccaagaggccgaacctttgtacttgtgggggtatgtgcatgcttattgtgagccaaaggcaggcatggagggggcaggattagggcagagcgccctgcaatggccaagggactgtgggtcaggggcgtagcttcatggtactctggcgaaaactctccaccccaacaccccaccactagctgccctggccttagcaggggaaacattgtccattgccaaggtcacagacctgagacttcctcccactgtgcctccccttctctctctccccttgaccaggtcttccctgctgagcccagtccatggtcatctatccctctaaaccccgagtctcgagtccaggatactgaggacctgtgcatggtcctctcccaaagtccaccctctgttctgaagaagtcctgggccagggcttccactcagaagtcaagcagcttccaaacattattggtatcagtcttccatcgctgctgtaacacattcacaaacatggcagcttaaatgatatacatttattattttatagctctggggatcagagtccaaatgtctctcacggacatcacatcctagcaagaggaagatggggaaaaaaaacaaatcaacatataaaatatccagtgtgggggataactgtcatggagaaaaataatcagggaaagggtataaggaccaaaggacagggcatgttgctgttttaggaaaaggggtcatgaaaggcctctctgaagtggtggcattagagaaaaagggaggaagtgaatcaaggcctgtgaatttctaagggaaggatgttccaggcaagcgggccagtcagagcaaaggcctgaggcaagagtgtgcctggagtgtttgagaagcagaagggtgatcagagtggtgggaggaagcaggttatggatgaagattttgaaggtgatgggagcctcattaagtagggccttgtgagccgtagggatggaggactttgggtttggtgctggatggaatggtcaagctgaaaataaacttcttgggaattgatgttgtataaaaacacctggtacaagacctgacacataacagtggtttaaaacacttccatccctaatcctccagggcaggagttttgtgtcctcagtctgtctaggattccccacgggctaagctgtgtctctcccgtcagactagcggattcccccttccaacttctcccagcctgcaggggtctcttcctcacactcagaagctatagcccagagcccagccctctccagacagccccccgccgctgcccctgtttgtgtttgcttagcatttcctcgcaggccccgcagttctgttagttttcattgctcctttattaattgccttttctgtccttgggattatttgatttccacttaattgcttgatggcagtgaggtttatttttgttctcttctttcccagaaatggggagggtgctggggagtgggccaggctggccgctcagggctgtctagtttcccacctgggcccttggatctccttcccacctgtcaccctacaggggatggaggctggggcccacaggctgccacagctctaagccccaggtcagggctgtaggggtcaaggaggaggaatactcgtagtgtttacagccacgatctggctgctaaagacccagttaaacctctcatctgtggcactggtgcctggagctgactgggaagaggcttgaacatacaccatcactcactcccagcagcctgtaagtgggagccattaatatcccagttgaggcaacaagaactgcagggaacttgcctgcagcctcagagccagcatggggcaggacaggaagccagatccatcagatgcaaaagacagaccattcccttttctgtgcatgagctctaccctctggggactctcagagcatggcagtgatggacaagtaagccgacagtgatcagtgaacatggaaggcagaaaattacccgcccacacaaccagggaaaaaagccacaaaaccctacagtgtgacccatttttcggtaaacgaacactgtctattcacatatatggaaagattcattctttcaacaaatatttactgagagctttctgtgcctgtttctcatctagttactagggataatgcagtcatagaaaagagaaggtcctgtcctcatgggccttgcattccagagggagagatgatcacacatgagaaaatcagcaagtgacaattttaaataatactacgtgctatgaaaaatatagggcgcaatattaaatggtgtggctagggaagacctctccaaaaaagtggcatcttgtggaaacctgagtgatgaggagctagtcagaatcagggcaagactgtgccaggcaaagaggatgacctgtgcaaaggccctgagcttgcagtgtttgaagaccgtcagacagaagcctgggaagtgagtgggaaggaagacgtcagagaggaaagcatggccagatcacacaaggctttgtcagctatggaatggagtttggatgttatgttaagtataaggggatgttatgggaggattttaaactttatgtagaaaaaaaaggtctggaaggatacctgctatactctaattggtggtaatcccctaagagagtgttgcagggtgaaagaagacaggatgagggattggggacagcaagactgacatcaaggtacaagagtgggaggcagacttggggccactcacaggcatagaggggcccagcactgggaaggcagaaggcttcagccagatgcctggggtggggccaggggaagagatatttagaccccaatggaagaggccactgggcagggagatgagtttctggaagctttgtctggttccaggggaccctgagaaggctgggtcagtctgccaggtcagggaaggccctgaaaaccttgacaaggaactgggttcccaggacatgagcagagggggcagctctgaagattgcatgttcatggtgggggaaggggaagttaggtaagaggctatagcctctggagtccaggacccgggtcacttggggtcacttatacattcatttatttattcagtgagcatgcattaaatacccacaaagcaccagacatgccatcattactggaaatagaagagtgcccatgatacacttggatcctaccctctcggacgtgagagcaatgcagacttgaccagacccaccttcttgtgggaagaagtgaactccctgagtctgcacaatgtgccagacatgcaataggtctctcgtattcatcacactgtttaatcctcatgacaaatcaaggaggaagtatcattgttcatggtttttagatgagggccctaggccttggagaggttgagggatttgctgaaagtcatgcagctataaatgtgagacagaatttgaacccagatctatcagaattaaaatcctgggctctttagatgccaccatgctgggagctcaaggaggatcttgtttccatgagctgggtagggatgaacttgtggatggctggtgatattgggcgtgtgtggtgggggtgtagggtagtggaaggttacttaagactgacaatcctggaggaggggttgtcatagggactctggcagaaactgcctccttcatccatggagacctaggcccacacttgcatggagcactgagaagactctgaactgtcacccagcccttgggctctctggctggggacacttggagcctaaacttcagggttagaccctttcctttccactacatttgggcttccagatctgctcaaaaacgtcaacgactcactcctccccacccatcactgcctacaaatgtacgtgtgatctcaaagcctggcattcaaagcctggcccaatctggctccaaactcctcaagttcatttctaaacacctgacacctctccagcacacatgctccatcctgtagcaagccaggggtcttagcccagggatttttggtggccaggaacagaaacccacacatgctaacataaggacccaacaggacaactcgtatcaggtcccacaggctttccccagccctacttccttctcctgctctttgctgcacaccggctttccctgctcacagccccagcactggggtggcaggtggctctgctttgtctggcaccaattcccactcccacactgtgtctcctgtcacctcacctgctccctgccatcaggattcagattctcaattatgagaagcagggctgtgattggctcagcataggttaggggttcaccctggtccaatcagctgtgccttcaaggaatggagttccttgtacatgactgccctttctaagtgccctgggtctctaagaatggacagtgggcctagaagccatggttgacattttaccttttcctgttctacaagccgacccctacttgccagcccctgagctttgacttttgctgcccttctacctggaacactctgcccacatttgatttctccagtcctccaactgggtaacaattcccacctcccaaatgcctttagatgccccttccccacctcttgccccatccaatgatgctctccaggcctcctcaggctcttcctcggcactccccagtttggtcctgcccagccccagtttgcactggcacaacatacttcccctagtctgtatccccacccctaccccagtacccagcatggatgctcaaacacattgatgagaaaaaggcaagtgcaaattctgaagaccccactggtgatgccaggctttccaaagcaaggctgactccttctctagatttggaaaatttctcctccctcttctgactactccccaacctagtctctaggacaacccccactctcagaccgggttttttggctagattcccccagctgccccaccatcctccctggtgtcccactcgggggcccatctcctccccctccccttcctgatgcctactctgaacctccaggttgggcagggagagttattcctccacccccacacacgcacctgcaaaaccttttaaatcaaagattacatcaaaatgctccaatgctgaagatactaatcacgccctccctcgctcgctttgctggaagagcaggatctcacttggactttccagtctcagctccattaatattttccctctctcttcctgtttaaacacagggtaatttaaaacctcttttcacagatgagaagcttttgactttggcaccagaacctgggtttgatttaggttttgttttttttgtttttttttttttttgatcctcagaatagatttttttcccagccagagggacccccccgatcctctgggccaaactggagcttttacagaaatgattgctgagacacagggaggagaagtggccttccccaggtccccagggtgagcagggtgagatcccagatttcctgactcccttgtttgcaccctcctcactctgctgcacatggtcatattttaatacttgcagaaactatgcactgaaagagaaaaagaggaacggattggatcaacaaatgtcaccttagagaggaccaaagccaaactgattccaacacagactggcataactatgaggacagtccctgtgttactgcaaagcttggggctgggcccagagtgcagtgctggaaccacagctgcctccagagatccctggccccagagcaggggcttggacatgagaaatagaggctctggggcctctggtcccctgatgcccagggaggcagggatcccaggatctacccagcattgtggctgctcccatcatagaagcccaggttcactgagggctggtgacatgccaggacctttgcatgcatcatcacatccagtcttcccaacaatcccatgaggtaggcatcagtgccactaggcccactgtatgagtgaggaaactgaggctcagaagaattcagcaacttgttcaagatcacacagcaggtatagggtagatcgaggatcagaagccatcaggcacaagagcccgagctcttcccattactgcccttagattagatttttttaaaaattctgcagtttagaaagcaaccaggtggggaaacatgagaaagactgagggaatgttatctacatggctgggggtgtgaggatgctgtcaggagtgccagaggccagcaagtcagcagacagctgatctcattgccagcctggctaggcccattggcaacactagcagctcagatgctcaactgggatcagacctgtcttcacttccctctgaggctgactctacccaagtggacaagccagccattccaaggccaagacagcagtaagaccccaggacagaggatgtgccctggcccatgggtggcatcggaatagtgctggacgaaagctgaatgtgcagggccatggaggccacctgcaccaattcctgacatagctaagaatgaaggaaggaaggagagggagaccagagaggaagaggaggaggcagcagctcttgcaagtaggaaaatgaagcttatctctcctttgagcttgagtcttagaggatttcctgtgggattggtgctcacccagagtaaaaacaacattcttgccatgactgtcagggcccttggtgacctgggctttctgatctcgctgacctcacctcctacttctgtcctcagtgcagactcctctccagccacatcagctgctttgctgttcctcaaaggccacaggcaccatcctgcctcctagcctttgcaattgcagttccctctgccttcacatcctcccatatcatatgcttggcttactttctttgggcctttactcagatatcaccttctcagagagaccagagagactgccccagcaacactatctagaattgcaaatcagccctaccattgcctaagtcccatggtctcgcatttcctcctccatacctctggccatcgaatctattttgtatatatttgcttttctctccacataagctccatgagagtaaagattttgtctatttttttccctgctcactcctcagagtttccaacagtgcctaatgcagaagcacatcattgaatgaggttggtcttcagtttagctagcaccaccttgaccacagtcaagtaggtgtttgaaaacggcaaggagatgttacacccaggtacctgtaaaccacccagctgtgatagagtgtgtgagagagggcagtggaaaccaggattcaaagccaggccagagaggaaatttccactgagtagttccaactattatggcaattatagctgcacatttctctccattgcagcatatgcttctattcaatcaggagggtctatgctaacactggaggttgtatatgagtgtgagtgtgtgagtgttgaaagaaaaaattagtaaaagatactcagagccaacagatagccacagacagacagaaaatgagatgagagtgggtgaaagggagagctagagctccctagaatatcttgcagggttgtttgagcatggtacctcatgctgttgaaattcttgttgcactgtcacattgtgtgtagttatgggtgtgcttgtctctatttctcatctgctgcagctctttgagggtggagacactgtggcattcacttggacctcctgtacctaactaggcgtctggtatatatacaataggtgcttggtacagttttgagaaattgacttggctttttggtttctttgttcgtttgtttgtttatactttaagttctgggatacatgtgcagaacacacaggtctgccacataggtatacacatgccatggtggtttgctgcacccacgaacccgtcatctacattaggcatttctcctaatgctacccctcccctagcccctcaccccctctacaggccccagtgtgtgatgttcccctccctgtgtccatgtgttatcattgttcaactcccacttatgagtgagaacatgcggtgtttggttttctgttcctgtgttagtttgctgagaatgatggtttccagcttcatccatgtccctgcaaaggacatgaactcatccttttttatggctgcatagtattccatggtgtatacgcgccacattttctttaaccagtctatcattgatgggcatttgggttggttccaggtcttattaaaaagtcaggaaacaacagatgctagagaggatgtggagaaataggaatgcttttacactgttgttggtgggaatgtaaattagttcaaccattgtggaagacagtgtggcaattcctcaaggatctagaaccagaaataccatttgacccagcaatctcattactgagcatatatccaaaggattataaatcattccactataaatcacatgcacacatatgtttattgcagcactattcaaaatagagaaattgacttggttttaatagcacttaattagctgggccaagggaaggggtgtgtttgggacctccctcaagggccattggtgggcttgtccaggctataccctttacaagacatgtgtcaatgaaaacaccccttgccttctttagacctcatttttgtcaccatgaaatacatgcttatactgtatcatctcttagagggtatccaactttaatattctgtggatttatggggattttattccaaattgcatgagccccttcctgaattgaggtagctactccccttacctagagggaaactgaggtgctaccagaagagatatagtgtatccagcctcattgccttgccccaggggtcagccccttctttttcctgtctaccctttgctttatgtgtggttccagtctaccctttgctttgtgtgtggtcattgtccattctgcatagcttcactcagactcaagagtggccttggccttctccgtctgtctcacccctcttcaatcccatcatcatgtcactgccagagaaaccacattggagctcagctctgatgattttacccctcctgcaagtccctccatggctccctattgcctacagaattaggctcagtccctcatccggcatttgaggccctccacaatgtgacagcacccttccttgctttcccactctcagctccctttctcatctcctcttcctcagaccaggttcttttccacccccatacctttgctcatgctagtgcctctcctagaacaccctcccagccccagtattcactctattcatcctccattgacccagtcaaagaccatttccctctctctccatgaaatttcccataattctccaaacaattggaacatttgacccagcccagccccagtgctctttctctgtgtttgttgtgaacatcctggagggtatgtcaggggttatctctgactgatatttgtaccctccatgcaccagcaagtgacctgcacacagtaggtgctttatatccctggtagaatgaagccaggcatgatggctcacacctgtaatcccagcaatttgggaggctgagacaggaggattgcttgaggtcaggaatttgagaccagcttgagtaacatagcgagaccccaatctctacaaataaaatttaaaaataaaaaataaaaatatatccttggtagaatgggatgtcaaggactccagtccagggtagaaataaccaccaacactggagcacatgcactctccaggcactgttttagctttgtggtataacgaaaaatacagtacagatgctccttgacttacgatgagcttactggacaaaactgcatggtagaccaaggaatgtactgaatgagtattgcttttgcactatcataaagtcaaaaattgtgacatcaaaccccatctgtatatttggtctttgtccctggtgcctggtgcagagcccctaaagcctttggaatttcctgagtgatacgaacatctttgattatccataaagagcccctttcaaccatacctgaatttatagtaatgaggtgatatttgggcccctaaatagcttcaggacaggagctggtagccagaggaaccagccatgtgaccagagggattcggaaatttcaacccctttctccagcctgctgggaggggagaagggctgataattgagttaatcaacaaaggtcacaatcatgcctatgtaatgaaacctccatagaaatttctaaatgatgcagttcaaagagcttccaaattggcaaacatgtctgcatggcaggaggatggtgcatcccaactctatggggacagaggctcctgcgcttgggacccttcagcaccttaccctatgaacctcttcatctggctgttcatttgtatcctttgtaataaactgtaatagtaagtataacatttttttttagttctgtgaattactgtggcaaattattgaacccttggtagagggattgtgggaactcctgaaatttgccctttgcaaaattttgtctttgcaaaaattataacagtgagaaaattatgacagtgaaagagatctgacctaaccaacccccatcttgcctttgagctccaaactgcccttagtcattcctgggcttgggccaagctatctttgggagaaatttagtttatagtttaaatgatgatagcccttccccaaaactaaaccacctttgtaaaacaatgaaagaccaaccaggttagaaggatgagaagagcctgaattctgctaagatgtagacataaacaactaccagccattattatggaggtcacaagatttgtaacttccccatttactcctgcagataacatcactattgtagaacctaaaattggtcttttgagatgtcttttcaggcttctgcatttctgatgtttgatagctccacccagacccacaactcttcactcaactggtcttgtggcccctacccagaagccaactcagcacacaagaaccattttccacatccctttgattgcatccacaacgaatcagcagcacccattcccttgcccatcaaactatccttgaaaaactctagcctctgaattttcagggatgctgacttgagtaataataaagctccagtctcccgttttgccagccataggtacattacactctctctattgcaattcctctatcttgataaatcagctctatctggccagtgggcaaaatgaacccattgggtggctgatcttgcagccaagtcagacagaagtgagggtaacctgagaagctgatacttgtgactggcatcagaggtgtgggtggtcttatgggactgagtccttaacctgtggtgtctgacagtaactccagatacttagtatatcagatttaaattgaattgcaagacatccagtcagtgttagagaatcagagaattggtcggatgaaggggaaaaagcccacaaactcttatatgtattaacttattttatcttacagcaatcctgtgaggcagatactgttactaccagtacccctattgtactggcgaggatacagtggctcagggacctgcccaaggccatagagctgatagccaagctggaattagagcccatgtcctcagcagctgcatctactgcaggccctccccaaccctccaggctagacacagtgagctcctgtgcctctcagttaagaggcataaggaaccccagcccctgccgaggtttcttagagtcactcttatagaagggggcagtttggaatgttgatcctgagccctgcatgggaaagatgcctcagagaagtagggctttcatgaggtggatgttcagcaagtatttgaaggctttttgttgtttgtttgtttagagacagggtctcactctgtcatccaggctggagtgcagggctgcaatcatagctcactgcagccttaactttcgggcctcaagtgatcctcccatctcagcctcctgaatagttggcactacaagtgtgcaccaccacactcagctaaatttttaattttttttgtagagatggggtcttgctttgttgcccagactggtcttgaatttctggcctcaagcaatcctcccacctcatctcccccaaagtactgggcttataagtgtgagccaacatgcctagccttcaacaagtatttgctaggaaaatgaaaggatgactaactggatgaatgagtaagagaaaaggtgagtgggggaacgagtacaagggccagagggattgaggaggagaaatgaggaagagtgaggggcaggtcccttctctctcccaccttaaacaaaaccctattgctctagccacagagctggccacagtatgaggagaaacctccccaaggcatccaaagggaatttgacagcaagaattcctgccttcccccattaggggcttgtgggaccccaagtgaaaaagggggttctaggaaagagtaattaaggacccccaagacagtatttacctgacattcaatatctggataaaagatgaaaactcatcattgtcaggatgtgttttttctctgtacaaaactctaggtatttagaaacatctgggtaaggggctggctgattctgcttttcatccagatgttcaacattatctactttcagtctgagtggaggggttgaagtggaggagaccaggggctgatgagggggaaaggacagcagtcgtgccctgtggaaccttctgtcccttggctcatcctagtcttcaccaccattcagagacttgccacctgagctgggaggatttgttctcccccaaccccatcacacagcccccaagttgcagggagctaagagacatcgtcatttatacatcttccactgagaaacagccggcctgatacagaattaactggcgtcttcctgctcccagattatgcaggcagcgactttgatcgaatctggcaaccagatttatgaatcagtcgatatttattgcagggaaaaatccatcttcatgactggtctgtgcacacagaaccctgctctgggcacacccaggggccttgatgctaaatgttggagaggtccagtgaacacatctgagggagggggcaacagagagggctctgacaccaatcaaaaaggagacaagttatgatgtgggaagtgtcagttgtgggggatagctaccacatccatccatgtttgtcctggtctgcccttcccacaccctttcccactccccagaccatctgactcagcaggagtcaactaattgttaaaagtatttgaagtcaaacataatgcaaaattttgatgtgatgcattcccaagtgaactaaaagtatattgttttcttctaacatctactcttttgttccctcccttgtccactggcccattaaagataattgagcctgaactctcaagctgtcttctgacagaccaatcagagagctgaggttaaaactctgctggtgagtggccagggaaaaggctactcaggattctctcatttgcatgcctgcactgattggctacattgctacagcctgcaccagaaaactagttcccagttaaggcagagggcacaatgaccatccacccaatgacaggcaatcagctcatttggaggactaggaaagatggtgtgttgagtagagcaaaaccatcctgggcttctcagcctaattggaagaaaggagtgaggggcagagtttaagatggtaaagaggaagaaagtagaattgtctcccaaacatggttttctactgctcccttctcagccctaactctgcctcctgccctgacaaccccttattcctctggccctgtacttcaacatgaccacactttagatactatgctcatggcccaccctccacaatccctcccctgcttggggcctcttgtaggaagtacaaggcccactaagcggcactggggaggaagagcagaaatgtttgtggaaagcttagtagcctccccaaagctgcagaatggaatttctcccagtggggacatcagagagaccttgaccttcctcatttccccagcctgcatatgccccaggcacgtggaggatgttctagcagtgatgcaggagctgagaggcaagggctgggttggggagacatgcccaggatccatctccacccagccacaaggcctgggcctgaagttgggcaggggagctgctttcttgccttacagagtcatagaaccatggtgaagggctggggaggaacaggcaggtgaaaggggcagctcagatggcacagagccaagaaatgggccaaatgagctccttagagcatgtgtattagtctattttcacactgctgataaagacatacccaagactaggtaatttataaagaaaaagaggtttaatggacccacagttccacgtggctggggaggcctacaatcatggcagaaggtgaaaggcatgtcttacatggcagcaggcaagagagaatgagagagccaagcaaaaggggaaaccccttataaaatcatcagatctcaggagacttattcactaccatgagaagagtatggggggaaactgcccccacgattcaattatctcccactgggtccctcctataatatgtgggaattatgggagctacaattcaagacaagatttaggtagggacagccaaaccatatcagcatgattgatgggaagagatgggggcacccagaggagctaagataatatccctcccccatccccaccccaactatggaccaaaacacctaggcacttgggctcttaacctagctctgagccttggctgatagcttcacttctccagacctctgtaagatggagaaccatctcttctcaggcttttcccagagtgatgtcaacaagacaattcatgtgaagggcttgaatctctgtggttccacagggcagaaccaggattgatgggtaaaatcacagggaggcaggctatgaaagatgtgcagtcagtgccacaggtgacatttggtcaacaacggatcacatgcactacaggggtcccataagattacagcacagtatttttgctgtgctttttccatgtttagatacacaaatatttaccattgtgttacagttacttatagtattcagtaacatgctgtacaggtttgtagtctaggagcataggttataccaggaagcctagatgtgtattaggctataccagctaggtttgtgtcagtacactctatgatgttcacacaaggatgaagttgcctaacgatgcatttctcagaacatatccctgtcattaggtgacacacgactgtagaagcatgtagaagagttttctgtattcaaagtatccaacaatagaagcagttaacataatgatctctctgtcaccaaaagcatccaagcatactttggatgaccatgttttgtagagtataacttctggacactcccacctgagatgggaattttatcataatgtgttggctgcctctaactctttatgattctattattcattcaacaaatgtttatcagttgcccactaaaccttcctctgaggctagtatgctatatgactactatttttgctcttagaacccagttttttatacaaaaaatgagggtgttgtgtcagcagacctctcagggctgttgcatctctgatgacctgccttgctcaaaatgacagtgggaccagaaggaaccatgaaggcacatcctcctctccctcctccccctccttcttggacttctttctgcactgcctgttacttagagttaggacagaatgaacttcccctggcctgggatgccacatgaaacagatggccctgttgccacagagaccagggagggctggggattgtcctggggggctggggattgggtggggatgaaggcaagaaaggggatttactcctgcaatagcccagcccagaatctacatgaatgtatgttcaacaggggtggctccaggcactcattcagtcagacagatcagaaaccacttaagatgaaagacccagaatatttgtgcctctcttcccgagaatggtgcaacttcctcagctccccattcccactgcaaaaccttgggcaggtccaggggatttgacccaattctcccacaggcaaagcggcacttcttcaggagagggatataggcagctctagagaggggcctggagatggggagaggctgacttattgggctcattcagaaaaataataataataataagttccccagcaatcagtgctgtccaatcacagatgggctgtcccatgtaaaagttgacttcttactccccgaaacatttgagctgggctgggagaattctcagcacagctttccctacaaataggagattgagcttgttgacttcctaaggtggctcttccaagtctgagatcttgcaatggtagaggcggtggaatgcaatgggtttgaatatgtgtttcggatgcaggcagccggggctccggccccagctgcgcatcttacttgctgtgtgaccttgagaaggttaactttctctgagcctcagttccctcatctgtgaagtgtaaatcaatactggctttataaaaaaaatatttgaaaggatctaaatgggataatgtatttaaagtgcttagcacagaaacttttatgtattaaatgccaagtaagtggtagttataattattctgcaatagtaaacccacagcagaatttggattggactcagtcaagatgcctggcttgtactctgccatttactgtgtgaccttggtaaatgtgttaatctctctgtgccttggtttcctcatctgcaaaataaggctaataattgtgcttacctcattattgtgaggattgaattccgtaacacatctgaagtgtttaaaatagaatctagccagtagcagtgtgctattgcaatgaactaaatgcttgtgttcctcccaaattcatgttaaaaatcctaagcccccattgtgatagtattaggaggcagggatttggggaggtaattaagttacaaaggtagaaccctcctgggtgggattactgtcctgataaaagggacccctgagagttctcctgccctcttctgccatgtgacagtacaagaagtcagaagtcttcagcccagaagaaggctctcacaagaacctgaccatgctggtaccctgatctccaacttctagctttcacagttgtgacaaataaattctgttgtgtataaggtactcagtccgtggtattttgttatagctaccagtactaagataactatcatcatcattgtcatcatcctcatcctcatctctaagtcacctctctaatgcctggtacttgttagtgcttatttaaagaaagattgagtgaacgaatgagtcagatatgaggtacaataataagcatttgtgacgatctgctgtgtttgtggtcctgtgctggccaagagaatgcagaggcactgtccttgtagggttaacactgagtttaagcaactagcaactttggggagaaatgaaacaccagtaagttctacagagcaccaaagaagagccattgtatccctgatggcacgaccagacaggcatctcggaaagagtgagagttgcacgaggcttcaggaaggtggcaaaaatttggcaagtgtccagacataaagaaggtaggtgggtagtattccaggtagggggacaataaggaaaagaacccaggtagtagtgcacatggcctttctggaagacagtaacagacacagaaggttgggtgggccccaggatttccatccagggcatccatgcctggagatgtgacagtacaagtcttcagggatgaaaaaggagttaggaagcaaggtagagcatttcatgtgaaaggcagcaatctggattccatttctacctggtagttgcatgaccttcagcaaataattcaatattataagcctcagtttccttatacttacaaggaggttaatacatgacccctacaaaaattaatattagttaccctacaaggctcattttagtgcagaatctggcatgtagaagatacccagccaatggcagctattgtttgtcctgtgagcagcaaagagccaagggaagctttttcctgataagcttcagggaaattaatcattgagtggtaggaaagacggattggagtgggacaaaagggaaggccaagagattggtttagagacagtggttcatgagcaaggcaatgctgctttaagatgtagtagagacagcagagatcgaaagggagaaaaagataaggcagtgcaacccaaaggacctagcagagcagaagttggtaactaatggaagagcaaggaatcaccagtggctccacacttttaaggaagagagggtgagcgagagaatagaagagggaactgatggggaaaagcctgagtgattccccatggaaaccatgatcttcataaaatgcaaatgttatgcagtcaataaacaaacatatcctgagcacctacaatgcagcaggtactaaagatataaatatgaacagatatagttcctgctctcagggactttgtggaagcaaagatatcaacaaatgcatgcaatgaaggataacagatgcctttatccacagtatctgtccaagtagactgcagaataaggaggtaattgatttcaccaagcttcgtggaggaagttactcatgaactgagcagatgttctccagggagattgtaggggggagatatccttcatatggataggaaagcatgagaaaaataccaatgagagaaaaagcatgacatgctggagacttccaagtcacagtgatactcagggctgtcagagccagagctgaggctggagatagctaaaggaaccattgcatgaacagcagtacaggttgtaatttggaaagagggaaggatcaagaatattgtattggaggtgttagacccctaaaggagaaggagatgagagttcaggacatgggcttaaagtcagatatatatggggagagttcagatgggaaaaatcaaggactatgctttctttaagatagagggaagggccaggcgcggtggctcacgcctgtaatcccagcactttgggaggccgaagcgggtggatcatgaggtcaggagatcgagaccatcctggctaacaaggtgaaaccccgtctctactaaaaatacaaaaaattagccgggcgcggtggcgggcgcctgtagtcccagctactcgggaggctgaggcaggagaatggcgtgaacccgggaagcggagcttgcagtgagccgagattgcgccactgcagtccgcagtccggcctgggcgacagagcgagactccgtctcaaaaaaaaaaaaaaaaaaaaaaaagatagagggaaggaagaaaaaaaaaataaagacagtttaaagtagggagtggggagctaataagcatgggagatccaccttgacctttgcataaaagccagaagcaagggcattagttaaaacaaaaaaaaggatgggcaggggcagggagagccagccaagctaggttgatgaaggaaagaaggagcacaacttactgatatcaggaatgagagagggattattactaccatccctagagatattagaaggataataagagaacaataataacaacttagacaaattggacacattctttgaaaaacaaaagtaactaaaactgacacaagataaaatagaaatttcaaatagccctgtatctattaaataaagtaaatttttaaatcaaaaacctttccacaaacaaaattccaataatagatggtttcactatgaatttcatcaaacattcaagaaagaaataatgcccatcctaaacaaactaagaaaatagaagagaatgttatggtgccagattaaccctgatcctaaaatctgatggacacattacaaaaaaaaaaagaaggaaaaaaatgccagaccaatatttctcactaatgtagataaaaaattattaacaaatcaaatccagcaatatataaaaagaataattaattataatcacctaggtttatcccaggaatagaagattgtctgaacacccaaaaactaattaatataatttattacattaatagaatagaacagaaaaaatcatagaattgtttttattaaatttaatacttgttcatcgttttaaaaaataaactgagcaaattgagaagaaaaggaactcagaaaattaggaatttcttcaatctgataaaatacatctatgaaacacctacagctaacatcatatttaatgataaacaatcagatgcattccccctgagatcagaaataaagcaatgatgtccactttcattatgtccaataacattttattggaagttctagccagagcaataaggcacgaaaaaggaacaaaaggcacatgcacagatgactgattgtttatgtagaaaatcctaagtgatatacaaaagagcaattagaactaataagtgaatttagcaaagtcccaggataaatgggcattacacataaatcaattatgtttccatataccagcagcaaactacttgaaaatgaaattttcaaaaattctctgcacaatcaggcaaaaaaaaaatacttaggaataaatttagcaaaagattggcaatacttacatactgaaaactaaaagaattaccgagattaattaaggaagacttaaatgaatgcttctgtactagaaaactcaatgttgttaagatgttaattctccccaatcaataactcccctgttaattctatggattcaagataatctcaatcccaatttccatcaggctttatttgtagaaattcataggcccattctaaaatggaaatgaaaatgcaaagaacctaggatattcaaggcaaacttgacaaagaaaaacaaagttggaggacttaacaagacttcaagtcttgttgtaaagctagtatactgtcaccaagacaggttggtagtataaagggagatataatttcatgggagataatagggagcccagaaataaacccacatttatatgttcatttgattttcaataagaaaccaatgtaatcctataggtaaaacaatcttttcaacaaatgtggctggaacaactggtcatccatacggaaaaatatgaattttgaccagtatctcacataatgcataaaatttaatttaaaaatgagtcatgtttctcaacatacaagctaaaagtacaaaacttctagaataaaacatagtttagaaaaatgaaggactagtcacaaactaggaggaaatatttgtgaaaaatatatattaatagacatatcaagaatgtacaaaagaatttctaaaacacgataataaaaacacaactcagtaaggaaaaggacaaaatatttaagtggacatttcacaataatgtatgtatactaaatatatacctactctatgacccagcgattccacttctaggtatttgcccaaaacacattaaaagatatgccaaccgaaagacttgtacaaaaatattcatagcaactttaaccacaggagctgctaactggaaaaaaacaaaaacaacctgtccatgaataggagagtggataaacaaattgtgatcactactccatgaatcaaaaggaagaaacatgcaaaaacatgggtgaatctcaaaaacacgatgacgctgggtgcagtggctcatgtctcccagtgcttcaggaggccaaggcaggaggattgcttgagcccaagagctcaagactacatagtgagaccccgtctctacagaaaaaaaaaaaattagtcagacatggtggcatacacctgtagtcctagctactcaggaggctgaagtaggaggatcacttgagcccaggaggctgaggctgcagagagccgagattgcaccactgcactcctgtctgggcaacagagtaagaccctgtctcaataaataaataaataaataaataaaagcatgataagtacatactagacaatttcacttatataagatcctagaaaggggtttttttaaaaatgagaactgtgattgcctctgcaaagtgagaacagtgattaaaaggggcatgaacagattttctgtgtgatagtaatgtccaatatcttgagagagatttgggttacacatgtgtaagcatttgttaaatctcaaaggctacacttataatttgtgtgttactgatgtcaatttaaccttcccacctcacacatacagaactacaagcaaatattgaactctacttaagggcaaagtatagcaaacatctacatcttactttaaaaaataccaaaaataagactgaagaatagatatatacataggtatttgatgaaagacataaggcaaaatgttgacaattgtagaatccagatactgggtatatgagtatttaaaattctttcaattgttctgcatgttttaaaatctcatttaaaaaggctttgggaagaggcaagtcaggagaaggggtgcagggctggtcaagaatgggaaaaaaaaaaactcagaatagccttgatatgagggcagaaatgagtggtcaggatttcccagcaggaatgatggctcagttagggttctatagcccttatgtgtaaggaagtcagtcagtatgtatcccagaagttctccagccaacaatcacccccagccagcttgatcacccctatccagttggacatctaggaaagaatggttctatcacatctgcatctcctgatggagagtgcctcctccatcagacgagaggttcctccagggcagggacttagtcccccacatcacataggagtttactttaagcaggaccgaggtctcccccattacactaggagcacccttaggataaagactatgtctttccgtcaacttgggagcttcctcgggacaggactaattccatcatcagaaggcttctctggatgtatctgccatctggtaggggcttctcagagggctggcaatagtttatctgtgtgtcccccatgactcccacatgggctctgcaggctgaatgcacttagagagagtgagggaaaagggattgacagtacccaaacaggagcactctatcttcaatcatcccaggagctgacacttatgggtttcacatttagccaggaaaaagcagcattaattcactgtggtgactgagattttacacatcctaacgtgaagaaattctaacttgaggttctcccagcaactgtagctgggcaacataacccccaggcacttgcaggaggtcacagcattcaacagctcactgggcaggggagagcacagctgccttcacacacctgggtccactggaactgaggatgggtggcaccaagagatcagggaatgggagacagtgctgaggacccagggagagaatgcctaccatcccagttttccaggtttctgtgtgagggatggttcaagcaaaataaagtgaatcgtatggagaagtgtaagcaggagatgagaaaagaagagccaaaagtgtgttctctactttccctctttagaacacaccataggataagtagtgcatctctcccatatctttctctctctcccatctctctctctctctttctctctctcatatgcatacacagatgtacagcttaaagtatgactcatgttcacaagagtaagttccttagcaactgatgacacatttctaagatgttggatgattaaacacctagagtcgacacctggctgagaaatggaacaaacttggttattatatgggatatgagatatatttatcttccatccttcaagccagtttcccatgggctccccttctcaccagacccttataagtttgactaacttccagattctctttgagactcaagtcctatcatgataacacagcttgtttttattattctgggtaaggtggagagggggccatcaagccaggccatgaggattaatcactcatcttttctgtcagattttttcaaagggtcattttatattccttccaatgattgtagacttgtagactagacaacttaaaggctctttttacctaaaaacatccaacttctgctaaaagaaacttaagtacatctcttggctcaacctaagtaagagaaatatatagtaatcccacccatctctcaaaatgtattaaaactaggatgaggaatagtgggcaagaaggcaattcaacatgcaggtgttggagcgagacacgaacacctactttcaccactgctattcatcattgtactactagagcaatgagacaagaaaaataaagtcatccaattggaaagcatgaagtaaagcaatctctattcatagaagatataatcctatatataaaaaccccaaagaatccacaagagcattataagagctaataaaagaattaaaaatgttgaaggtataagatcaatatgcaaaaatcagtggtgtttctatacatctgcaatgaagacagggaaattaagaaggcaataccattcacaatagcatctaaaacaataacacttctaggcataaatttaaccaaggaggtgaaagacctccacagtgaactccagaaaacattgttaaaagaaattaaagaagacataaataaataaatggaaaagcaacccatgctcatggttaggaagacaatattgtcaaatggcctacactacttgaaatgatcttcagattcaatacaatcgctatcaaaaacatccaacagacatcttttctttattactatcttttggagaaatgaaaaagccaatcctcaaattcacatggaactgcaagggaccttgaatagacaaaataatattgatggaaaacaaagtaggaaggctagcactttccaatctcaacacttactgcaaagctatggtaatcaaaagaatgtagtactggtataaggactgtcatataggcccatggaatagaactgaaagtccagaaaataaactcatatttctatggccaattgatttttttacaagggtgccaagtcttttcaatacagaaaaaagagtctctttaacaagtggtgctagaacaactggatttccacatgcaaaagaaaagctggacccctatctcatagaatatacaaaaattaactctaagtagatcaagaacttaaatgtaataaaaatataaaattcttggaagaaaacatagggaaaaatcttggacttggcaatggattcatgggtatagtaccaaaactataagcaagagaagaaaaaagtagatacattggacttcatcaaagttaaaaataattgtgcattaaaagacattatcaagaaagtgaagacaatctactaaatgtaagaaaatatttgcatatcatttgataaaggcttgctatccagaatacataaagaattcctacactcaataataaaaagacaaatgatccaattaaaaaatggacaaaatatttgaagagactttagagagcatataaaaataaccaataaggacatgaaaatatgctcaatatcactagtcatcaggcaaatgcaaattgaaaccacagtaatataccactgtacacataccacaatagcaataacaaaaaatagtagtggaaaatagcaagtgtgattgaaaatgtggagaaatcagaaccctcatgcattgctggaaggaatgtaaagtggtgcaaactttgcagcaaacactatactgattcctcagaaaagctaaacatagaataaccatacaatccaacaacttcactactaggtatatatccaaaagatggaaacaacctgagtctatcaacagataaatagataagcaaaatgtggtataaacaggcaatgttaatatgactcatctataaaaggaaatgaagttctggtatatattacaacaaggagcaaccttggaaaaattactttaagtgaaataagccagacacaaagaataaatactaaatggttccatttatttgaaatatctataataggtaaatttgtagagacaaaaagtagatcagaggttgccaagggctgagtgaaggagaaaatgagaagtcattgcctaatggtagagagtttctgttgggacattggttatagatagtgatacttgcacaacactgtgaatgtaattgatgccactaaatcatacacataaaatggttaaaatcacaaattttaaatttttgccacagttactatatgttgccacacaaaaaaatgtagtgataagtattccctatggacagttgctgatatcagtgcttccactgatagcaatattaaacccaagagcggtggtaaggtagagaaactgagccagggctcccactttaacctgggttctcaaaatggttaaattggttccagaacaacaacattcccctggctcctgaagaagcaaataagtcttctttggaaaaaagcatctataatttaggttcctcacattcccacacatcatgtgtacccaaacatgaattcacaaagattacaactgtatagggaaataaaccactatgagtgagaatcagcacaggcaaccaacaacaaattcaggctctcaagggcttcaggtattggagttatttattagaagacaagcttcataacagcacgcatttttctatttagtttactgctgattatcaatctctataacagtaactggtatataataggcactaaacaaacatttgatgaatattcagacataaaaaccaaatatgtataaaacatttgaagaaatttgaaaatcagaataatgagcaaacagtaatggaccataaaaattattggaaatatttataaaaagaaccaaataggagcaaggtatggtggcttacatctgtaatcccaacactctgggggatgaaggtgggaagatctcttgaggccagcagttcaagtccagcctgggcaacagtgcaagaccctgtctctaaaaaagaactaaatagtacttttagaaatgaaggggatataataaattagacacactgaagagataatttagtagactgggcaatcagactgaggaaattattcagaaagataagatgttgtaaaataatgaaagagagattaagagatatggaagatagaatcaaaagagatctagcatgcgtttatcagagacccagatggaaataatagagtatcaaagaagaggcccagatggagagaatagaaagaatcaaagaaagaaaatatatgaataaaaataactgaaatttttccacaagtgataaaagaaatgtatccaaagtataggaagcacaatatatatcaagtagaattttttttaatttatgtttacacacatcattgtgaaattacaggataccaaaatggtgtccagagagaaaagaaatcagattcaagagccggagagaaaagacagatcatatataacagagctagagttaggctgacagtggacttctcataaacaacagaaaccagatgacagtggagtgtctttaaaatttcaagaaaaataatcatcaatatagaaatgtgtatcctgcaaaactgtctttcaaaagcaaacatgcaataaatacatctgtagatgaccaaaatctgagataatttaccaccaacagaacttcaccaaacggacttctcaaagatctacttcaggaaaaaagaaaatgattccagaaggaaaacctcaaatgcatagtagaaaggggaggaaagaaattggcaaagataaacattagtaagtaaattggtaaattaaaacattgtctcttgggagcaattactattctaatgtccaatgttgggactaaaacaaaagacagaccaaaaggactgaaaaaaatagcaattctcttctgtcggctgtctgaagtgaagaaggtcaacaatattgctgtgtacatagctgaaacttcagaagttgagaaaaacatcagtttgagtgactaactctgagcctgtttctctatgaggaagcccataatggacattatattcacatctcttcattggactgtggtgaagttcacctttaaaaatttcagcttctagatgggcctcttgctccactcaaaattgactgacttaagtcagtcaaaattcctgacttaagacatcatctgaacatgtttaataataaatctaattgtgtatattggccgtctatactgaccacttttgcattgtgctttttattgatacatgtgtattttacttccaaaccttcctttttgaaaattaacaaaaatttaaccttttaaagtactttaaaaataataaaagtatatgtacttttatgaggtgatagacatgctatgtactcctaacaaaagtgtggtctactgaccacccacatcacattcacctgggtcacttgttaaaaacaccactacatccctgatgaatcagaatctctgcagttgggaaccagcaacaagcatgttcaaaaaaaaagctccttcaattatgcttccagctaaaaaatttgggacccataactgtaggtgataaaggagagaataccattaggagtagagaagagacagtaaagaggtgaaattagtccttgagaggcagctttgggtacacatctgtcaccaccagagctgttaaagacttgctggagatctcactacgaaatgagctcacccgttcttagtgccacttctctcccaacccatcccaaacccctttccccaacacacacacacacacacacacacacacacacacacaaatggataatttgttctgcaatgtcaagagaagaccaaaactataagaaagcaaacaactactcataggcagcacctgcaaaatgaataacaacaatagccacattgggggaaggggtgtagattgtgtacgtccttggattttattcttaagtaagataaaagttattggtaagttttgaagaggtaaaatgtgaaccatcgtatgtatttatagaatgactttggggacaaggggagaagcagaaatcagttaggaggctaacgaaatcaccaggtgagaggtgatggtggatgcacccaggatgcagcagtggaagtggtaagaagtagccagattctgaacatgttttgtaaataaacacaataggaatttttaacagaataaaactagtgtgtgtgagaaggaaaggtgttgaggatgacatcaagaattttagtccgagcaaaggatggatggagttgacacttacggagatgggaaagactgtgggagaagcgtggttagaagagggaatatcaagagtttctttagggatgtgttaagttcaatttaagatgtctaagaggagatgctgggtaggcagcatctggtatacaagagtaggcagctggggatatgagtgagtctggagtcaggtatgtgtcagagattatagattcaggactgttaagatacttgtccaaggtcacacagcgagaaagtggcagaacccagaactcagtcctgcagcatccgacatcaaggcctggattcttaacctctatgttatgctgcttctccaggaacccaaggtgaaccaagacctagtttctgagagaagagaacagagtagaagttttcaaactgcagacctatggcctcggtgactataattcttcctgtcccaacaagagttgtttctaggttacgactttgtctttactccctttcagcatgtacttgcctttcgaagaaatcatttcccaggaaatgggcaccccatgtatttctgtgcatgtggatagagtgggaggaagggagagttgagtttttgagggcttttttccccctttctttcttttctccttttttttttttttttttttttttggaaactgtctgggggctgtggtgttgctgctggtggtggcagcaactgctacaatcagagctattttgaaccaaagaactaatttactgcatgaatgactttagctcaaaagaagaaataaggacgatcaggagtcctaagggaaacgaataatagggtaatttacacggggagatgagggaggtgagaggaacacacagggtaattctttggctaatctttattttctatttttgccctttctccctctgcctctccaggggcagatcctcagctctgagatgcttctggccatccgcaggattgatacctgaaaaggatgaaagggcaagggagatggggctacttagagtggagaagagaaggtcaaaacgcagtttcatgtccattttctaaagccagcttctaccagggagatggtctgtgagaggccaccattaagccttgggacaggtgagggattgcaaaggacaatatcatgtgcccaactgagtgccatatacacctgtacccaccagcttgggatggccccaaactaagagttcactattaccccctttcttaatttcccagcacagagagaatcgagaatagcaggactcttggagagaatttagtccaaggcctatatattccatggcaaggaaaccccaaaggcctggattctagatcttactccagcacatactagctatttgacctttgtcggaccctgaaacccagagtttcctcatatatgcaatcaaaattgtcattttcttcactgagtaataaggatcaaaaggccgggcaccatggctcatgcctgtaatcccagcactttgggaggctgaagcaggcgaattacttgaggtcaggagtttgagaccagcctggccaacatggtgaaaccctgtctctactgaaaatacaaaaattagctgggcatggtggtgggcacttgtaatcccagttactcgggaggctgaggcaggagaattacttgaacctaggaagcggaggttgcagtgagctgagattgtgccgggacaccccagcctgagtgacagagtgagactctgcctcaaaacaaagaaaaaaacaaataaaaaaaacaatgtctgacaaagcactttgtaaactgcaaagcaccctgtaaaggtgagttattgttattggtacttgtcaatgaaggaaactgagtcccagaggcattatgtgactcatccaaagtcacattgcaaataaatgcagaataaagacttgaacctaagcctccagtgttccttccacaggagaagtagtgtggcattatggttaagggtatagaccttagagctgtgaaagaagaaattagtcataactcttgtcatgaatcaaggcaggcttgattcgaggctattgtaattggtatagggacgactgccatggagttttgcagtagaggagtgagatagggctcaacttccaatacaacatgaaaatgtgggaacttatagccaaagagtgggatggagaggggtgattgatgggtgaaaaatcactaagtagacatttgaaggggaaagagggatttctggctaaaccaacctaaccagatttttgcttgaggcaggccagaatgaccagatatcaactggggaatggtagaggatgaggaatttgctcagatatagatggtggaggatcttgctaaaccgacttagcaggattcttgctaaaatcaggcaatgcaaagacaaaaccaaagtccaaaagtcaaggcctggttgggaagaggactcaggggagcctgacttaagtttgttcaaggaggggctcttcatcagagccaggctacctggttcaccgtttgccaaccatgggactttgggtaagttggttaccatcttcaacctacttcatagagttgtatgagttatatgcatacatgtaatgtatacatggctacatatatacacggctacaagtatacatgtgcagcatttagaaaatgcctgcaaatgatgtctaataaatgctagatgttgatcttattcaggaaaatggactaaacccagggagcttcaaagcatgtggagattctccccttatggattctctcaaagaccaagaaaagaaatgagagtcagatgccacagtaggagttgaggttcagctgacatggagcttcatgtatggtaaagccaaactaccttgccttggagtcaggagtcctaagttcttgtcccagctctgccacctaaggcagacccgggacaagagcatgtctaaggctcaggtgccttgtctataaaatcaatctaacaatcatttctcaacctgtccatactacagggctttggttagatccaagtcaaaaactcatgaactgtaaggttctgtgaacatattaatattatttttggcagtacagctctctgaaacacgttttacaggtgtgtgcattggggatcaggggtgactgggaaaggtacagcattttctgcctctggaaagcatgaacaatagtcagcctccagagtgtgttgggttgcagttccttctgacagtgaaagatcttcagggtcttttgtgcacaatcctagccaggtaccacccaagaacagacatgagggggatggaacaggacaaattagttgcatactttacaccatcccccagcccctacaatgctcctacaggtgaaaccaggttaattgcatatatttacatctttcaaagccttctgtcagacactcccttcagaaaaactgcctagagttttctagctgatgatcctcttatccttcccaggatgctttttttccttgcatacgtggttaactctcaattaaatggagcaatggaacatagaggagtagagggaagccacacatagccctgagtcacaaataaaacaagactgcagtaacctttcattatatgttatcagattactgtggggaagaagagctctagacctgggggtgctcacttctcagaaggagtttggaaactgggccagggatgatgtgtataattacacaaaggaattaaccttggggtcaggaagctaggggtagagatagaaaaggggacagaagttgttccagttgtgaagcaagtaggagcctatccgaccctctgacatggcatcacagacatttgctcttcacaaagcaggtttcaatatacactaatcacctctgctaagcctctttgggggaggtgagcacatctcagcctctaaagtattttagccacaggtaatgcattcattaaccctcatataatgataataaccatggttttgttactacatctagcacattatattgcaatttgttacctttacaggtcccacaccagattagaaactctttgagggaagggactgtgtcaaattcactttacaccccttgtgtccagagcctcacataccatagctgcttagcaaaactgtgtggggcaaatatttgttgaatttacagagttgaatgtgtcattagaatgcagcttattgccttttccggaagtagggagcagcaggagttttaccccataaatcagtcactgtcttatgtgctgaatggatcaggggaggccctagaagccatcagcagattggaaggaaggagcctaaactttaagaccagactcagagctgagttctgaatgctaacagtgaccatgacttactgaatcaagattttctggggggataggaaaggagaacccaaggaatacttcaaaacatcatgtttcctaaatccctacgtaagcaccaccaatctgatgtagataccggcaccatcattcttggaggcagaagcatggacaaactgacttacgtccttggtcatggaattcaaccttggccacagttttatgtacactgaccttctctgtcccagacctctttgttaatccactataattaagcagccacaaatgctgcataaagagccagttactaccataaacacaagatcaggagttattctctgttacctgtacataaatgttcccacttaatgtgtaacagtacctattccatgattgaatggactctaggtttatggcagtagctgttgcgtgctgtagcctgtggttttatggccctaattccataataagccttagttttaatttttctccttctaccctgtagccagagtctcctgggtgtgggggaagggagagggcttctgcccaatggctctaggcaacctgtcacagaaaaaaatcttcgctagagccaaatcaacccacctgctcctccatcaaagaagaaggtcacctaccccgtggggaggaggcctgaacagcccagatgccctccatgtcagaggtctgagctttgaaagtggcaaatttgtcctgtaaatgtgccagggcagtgccagctgttcactgccccaggagatgtcgtagctggggcaaagggaaggaaggagtcaggaaaacaggccaggattaggaggtctgccagttggaggacctgaacctagccatagggcacagcatcattaagcaggaaccaagggaagggggtgtgccacaagctccatcgctgtccatggtgctgactcatgcttgcaaactaggtcctgattgtttctccgaaccctaggattctggagaatcctgtccaaccttcttttgattatatttccttttctgatgacagtttagcatttttacactgctgcagaataagcagaatcatgacatgtgtttcgcaattgatgcaattggtttcaagtaatgtttacagttctatcatatttccaacatttacaagaaagttcccttgggcattttaggtgatcctctccctaaaacaccattgctattcacataatctcagcacacagtgtagaggtgacaagtggaaagaggatagcaccagcaggagctactaggtgagtaaagttgatcccagcaggacgcctccccacctgcaaatttactattctagggagccaccaaacaacccttgtggagcacaacatgttgtttgaaccattctaattttgtaaagtcacttagcatgacaaaaactcttccaagagacatatttaagaagtaggtggcaagaataaaaagggagaatctccatcccagctccactctccagagaagaaaaagtaatggacataccctaagaagaaatctggtattttacctgctataacaaagacaggggctgcagatgaggaaaaacaggaaatttggaagaactcaatatgagattattttaggcccattttctttctactcctggacctgtatgcattttggagtgggagaagtataggtctcttgttacctggtgagtctgggccaagcatttaatctctctgtacctctgcttctgtatctatcaagctgataacaacaataatcctttgctatggtttgaatgtttttgtcctcttccaaaattcatgtgttggaatctcaatccccaatgcaatagtgttgggaggtgaagcgtgttgggagatgcttaggttatgatagctctgccctcatgaatggattaatgcccttagaaaaggggttgacaaaggaaattatctcactctctttttccctccaaccttctgttatgtgggcacacagtattcctcccctccagatgatgcagcattcaagatacgttcttggaagcagagagcagatactcattaaacactgaacctgccaatgccttgttcttggacttcccagcctccagaactgtaagaaatatatttatgttccatatggatcacccaatccatggtattttattatggcagcacaaagaaattaagacatctttcttcacagggatcttaggaggactaaatgaaataataaacgtaaaacacccaaagcatggtgaagactcaatagatgatagattctcctctaccctcccttctgtatcttatttttctcaaatattcaatgagactttgaacaccacctcggaaatccaagaaggcaaaacccacttgaacttcaggttaccgaagctcaacccccttgcctgctctaaatccaggaatagaggggaaaggtaagacttttcaggtcaattctcttgttaagatatctggccaggtgtggtggcacatgcttgtaaacccagaactctgggaggctgaggcaggtgtatcactcaagcccagaagttcaaggccagcctaggtaacatagtgaacctctgtctctatgaaaaatacaaaaaatagccaggtgtggtggcatgtgcctgtggccccagataaggagtctgaggtaggagtatcacctaagcccagggaagtcaagactgcagtgaactatgattgcaccactggactccagtctgagtgacagagtaagactctgtatttttttaaaaaaagatatctgagggaaaccttgaggtcatggagatcagctggtgataagaggaccattgccagccccatggaatcacactcacactcatcccataaagaagaaggaggagcatatgactaaataacttgctccctgtcttctccagttccccacaattcctcttcatgacccctctgccatagacacaggaaattttgggaaaacaggcatcaatggcagtcctgatcagtgcaaccagggagtaaatatcacaataaagtgataggactggactaaatgtcctctaatctcctttagtcatgatcctactatatgtatattccgacttgcacaagctgcttggaggcagaatttccatcttagattttggctatgtcacccacagctctgattatagacttaccacatgcatgcacgaaatttcaaaacatcatgtggtttaccataaatatatgcaacttttacttgtcaatttaaaaataaataaagttaaaattttaaaaaccatgacaactgacaaatggggggaaaaaagtgcaactgtaattcggccagatctaatatggttgattctctctgggcccaagctcttcagaaccgtggacagctcctgacagccgggagaaggggaaagtggttgagcagaatggcagaaaaacaaaaactagaatgtcagaaactggaaaagacctgagaggttttctaaatccaatcatttattttgaagatagaaaactggggcccagagaaggggaaagaattattctggagtcatgcagtgaccaggtgggttcactcattttctcataactcaagaaagtgcaaaagcaacttcaactctttagagtgagacataatatttacatatttgttcccaatttgagtgtttctgtcccaaaagacaaagaacagaacaagagaatctgtctcaagatttccttgttacattctctgttgaacaaatttagaataagagctcctttcttaggcatggaatcacacacacacacagaaacacacacacacacagacacatacagacacacacacacacacacacatacacaccacacttttcccaactatgatctcctttattactgtgctcctggagcgtgaggggcttgactcacctctctccaagacaaaggccacctgagtttagggaccaccctcttccctgtaggatccagttgaatactcttttttagtcatctttctgcatcgaactttatattcagctcccctaactcatctggaccagcaccccaccaacagaaaccagaataatatctgccccaccagcccaagaattccataagggagatagccacaatatcttgccaggttggtgctccttcttactgggagccacacttccctcatcaggttcacacttcccataagatgagaatggggtctcttccagcaggcagagccctgtctcttcctctcactccacaatacttgggatgatagctcagaaaaatggggcaattataaaaaaattatactgaggccaggagtcttttcaggaaccagacaccttccttaaagcgtgaagaaagtgcagcatctaggaatctgaaatctctctcactacatttttacaagttcacatcctacctcccaccctcctcatctcagcttcagaaacctctccattattcagtgtctccaaaagaaggaaaatgtctgggaactttggtgctaagctgctaattggagtctgtggcttgaagggagggggcaaggaaacagaagttattgtgccccagaaacacaattattcagatttccttgcttgctggaatcctgaggctggactgtccctttactcccctcatgaaggcagtcacttctctgcagagccagaaccaatagccaaagtatgcaaggtgcctgaaggtggcaatggcacagccttgaaaggcagaaagtctcctccctagttcactgataacaaagatcaggctgaatgccttgatgtctttccaagccattcaggcttctcaactttgggtttgggaaggtctccaaactctcaactcttttttttcttcaactttaaagttctgaagtacatgtgcaagatgtgcgggtttgttacataggtaaatgtgtgccatggtttgctgcacagatcatcccatcacctaggtattaagcccagcatccattagctattcttcctgatgatcttcctccccttgaccctctgacaggccccactgtgtgttgtattcccccatgtgtccatgtgttctcattgttcagctcccacttatgagaacatgcggtgtttggttttctgttccagtgttagtttgctgaggataatggcttccagctccatccatgtccctgcaaaggacataataatctcattcctttttataactgcatagtattccatggtgtgtgtgtaccacattttctttatccagtctatcattgatggacacttgggttgattccatgtctttgctattgtgaatagtgctacaatgaatatgtgtgtgcatgtatctttataatagaatgatttatattcctttgggtatatatccagtaatgggattgctgggtctagttagatttctgcttatagatctttgagaaatcaccacactgtcttccacaatggttgaactaattgacactcccactaacagtgtaaaagcattccttttgcttggcaacctcaccagtatctgttgtttcttgactttttaataatagccattctgactggtatgagatggtatctcatagtggttttgatttgcatttctctgatgatcagtgatattgagctttttttcatatgtttgttggccgcatgaatgtcttcttttgagaagtctgttcatgtcctttgcccactttttaatggggttgaacactcacgtcttaagcatggaaagccagtactaaaagggactttagaaatcatctcgtttcatcttcttattttacagatgggtaaatataggctcagagggattcacaaagcaatttagcattgatgttcgtctctgaaactcagaactccccaccctggtcaggaaagtggcaccgtcgtaaagtagaaagggctctgaaatcagacacgactggtgtccaaatattgaccctgccacctgaaatgctctgtgttcttggcaaagtcacttaacctctctggacctgtttcctcagtgtttaaaatgggggtgaggataggctattgtgaggatttaatgagataacatgtgtggaagtgcatcatatgtaacagatggtcaaaggagtgaattttttcccccactctgattcctctcagcagcagtctatctgcagctccttcttgaccttccccagctcttttgttttcccccacagcctgtgctcctcagcactctcttttcctgccccatctatatgcccaactcccctccagagtgggtgaggaaggaggggttaataacaagagttcttgggtcccctccaggtctctgaaagttagcaaagttctcatgcaaccaagcagaggcagggaacagagcgagagtaggaggagacaggcaaggtcggcaagctggcctctttgttcctggaaaatgagtgcaatttccattcctttccacggaagctgagtccagcaccagtgtgtggcaacaggcagcagaggtgttgccgtggtgagtaatggtcctggctatggctctgccctcagcttgtacctcatgccccaaagacgaacttagggctaatgagtcagtgtgagtgacagctttgacttggccctggctggcacaacagtccctcaaaacccctgcactatttctgttctctagggagccctccaaaccccatctccggagatgttgctggtgctcatttgattcactgcactggaggagatggaggcccagagaggggaagctcctctctcctgcagaagctgtgagctttctgacactctccagggccctgtcagcagcccacacaattacctgcagaagacagaattaaacctcagacacagctgacttaagtgtcagcttgctagctatgtggccttaggtaaattacctaacctcaatgttcctgcctgtaaaagtgttaatgatagtatctatgcgtcgttaaaggatgaaatgggtcagggcatttaaagcactgtgcacagtgcctagaacagagtaggcacttttcatgcatgattctccctcttgtactcattcacagaccctttccatctttctcctctccacctgcttctccaaacattgtcagggaggcaaaaatatccaagatgagactcacagtaaatgtgttctccagcctctaaaggaaattaaaagccagaaaccagggaaatcatgtttttaggagaggcccaggggttccccaagcctgggttcccatgacagggtaagagaagctcctgctggatcatgtcctgatctttaccctgagcatcattcgatgggagaagaaacagaggacaacatgttaaatcttatatctgtcactttctctgaccgccaggcccttggaggggacactgagctctgtggtctacaagagtggcctgcaggggcctggggtaaataatgtccacttgcaggccagagaaggatttgattgagaggagcatagaggagggccctgtgggacagggaggaagcctctttcagatcctctccctgaccgcattcacacacacaggtgcatgcacctgcctgcttggaggcacatcataagctgcaagcctgacatgcatgttttttttcccaggtaagtaggtgggtgtgcacaggcgggcctcctcacctgtgtccagtgcttgcaggaggggctgcatgtcccatctgagtcttagtcccacccagagaggaccttcagaagcctgggtctcatcccccagcccactggcggatggcagatctaaaaaggcccagaggtgtaaggtggcctatcaatgtcacccaggctggaagtggcagaggtgtggctcaaatccatgttttctgactccaaagctagtgttctttccaccgaagcatgcccacagtgcacacacgcatacccacacacactctcactggcaagtgagcacacacgcatctagcagagggctcactgtcaccagcccattatatagggctgcatttatcaggttgaacccttctaacacctgtaggaggttaagtatgtattatccctattttttcgggtgaggaaaccgaggcacagagaagttaagtcactagtccaaggacacataattagagcccaaatgtgaattttgagcagtctggcatcagaacttcttaactgccattatctccgctatactgctatatctgtgcacgagtgctcacacacttacattcatatacacactcacatactcacacattggtcttgggtgatctgggcgctcacccctgatgcagcaatgatgccaagaccagagagaggaagctggctccggccttagggtggacctccttcctggagaaaacagaaacatctctcccaactctttctctccccttgccctgccccagcacctgcatgagaagaaaaaaacatccaccattcccttcctcattccaaccccatctctctaagcccccatctgcttggttccccaagggcttccggttgcattgcaaagatgtcctggcagtagggaggcaagaacagaatgaaatatatgtaacatcttattagtaaaggacatctgagcctctaattaaaatttgcctaatgacccaacttctctgtcatttttgctcttagagagattaatttaaggtgacaggtacttaggcaaaggaaaattaatttttcctttaaaaaatcaaagaggaaaagagtggcctgctcccttatttgtttgtctttaaaatgtttatttatttgtcaaattccctcccactctttcccaataaaacctaatgatggagaataatttggtgaagggaaggagactgaaagaaaagtgtcatggggtagcctggtggtacccacttgccctgaggagggctgtttgtggttcccctgcttaggagcccctgactgctcattgacaagcctgccggcaagctggctaatgctgctcaggttctaggggaacctgtttccatctaggctgtttgacttggctgtgccagtggtatctgtttctctatggaacagatggtggtacctctcccccaacaccgggctgcagcccagctttccgcctcagcatatttccccaagcaacaggctgcagccttgaacacactctgctttcaggaaacaggtgagaaattcgagggttgcagctgtggtctttctgtgtgactcccctccctgtcttctgtcctcccgactcctctggtctctgagtacagaggagagggccatcctgacaaggagacaggggcgtggacttcaagatattccaatctcagagttcagatcctgcaaaaacctattgggatgggtctagagattacagaaacatgtccttagcattccccctcacaacctttttcaaaaatagtattcctggccagggtcagtggcccatgtctgtactcccagcactctgggaggctgaagcaggggaatcgcttgagcctaggagttccagaccagcctgggcaacatggagaaaccctgcccctacaaaaatacaaaaatttgccaggcatggtggcctgttcctgtagttccagctactcgggaggctgaggtaggaagatggcttgaacccaggcagtggaggttgcagtgagcagagattgttccactgcactccagcctgggtgacagagtgagactctgtctcaataataacaataatattcctcttttgtcccataggctcctcttcagactctctgatgctctgtctcttctcactcttcccagggcatcctactccatcctcacccacattttcatccccaccccatccccacccagctctcagatctcaccctgacccaacctgctccactccacttcctaaggcctttctgctgctctttcctcattcttcaggatattagctttgaatcaggtgtttccagtagactaagagttggagaagacaggcaggaggagagggagagaggtgaagaaggaagaggaatccttttttctagagacctaagtcctgctcctaacccctctctctctttatctccatttccctctccagcagcatgactgatgctgggaaatctgtcaggttttgcttcctggggagccaagggaggcttttctagcaattaggccaaggcctctaatccaagaaagctctaaacacccggcaagcaataactcggtccactgggccctgtagggaggacaggaggagcaagagaggtgtactcagggttcctctccatcacctggccacagggctggggccaacccacaggaaggggctgctgagaaggtgagcatgggtggagaccactgtggggatagataactcaaaagcgcatccatccacaggctcagttcagcccctgccaggccacctacactgcagttcccccatcacacaagagccagaaagggaaatcagtggtgaggctgtgggcaggaagaaggcatgtatgcagggcagggtgaggaaagtgggatttggagtcaaaaggacccgtgtctgagctccactttcaccttcccatgtgctcttgagcatgtcactccactcatctgagcttcactggcctgctaagtaaaatggagatgatagtaacaccatccactcaagaggatccctgggagggacggaagagctggtggatggcaggtgacaaaggacccctcctctacatctgcccacagccccaccctccacccactggctggggagagctgcaatttctctaatgcacggagggaaaagacgggccaaggttttaaagatgcctgttcatctcactttgcatatatttgcatattgagttcaagaggctcatcctaattctgaggatggaaaataaaataaattaacaaatacgagattaacagatgcaactcctgcagcaattgtctccttggctgttctgggcttgacaccctggagacaaagaatgctctcaaggcaatcaacttttaatcatctctggacagaagccccagacagagggaccctgtccctcccacccccactcagaggtcagtgctgaaggatgtagaggagaggggccttggagagtggagggctagggccagactctgtggcaggcagtgacccttgatttgctcctttatgaacttgcagtgcaaggtgtggtggaaaagagcatggcctcagggccacactgcccaggtctgaatcctggctgcgccatgtccagctctgtgcccttgggcaagtcacctaacctctctgttcttgggtggcctcctgagtcaaatgagaataatagtaacacctaccccatagggttagtgtgaggattgaatgagttgtgttacagctgtgttcagcatattgtaaatgcctggtaagtactgactagtattactatttttatcatcactatcaccgttgttgtcatcatcatggtttattattattattatgtgatagaaaatgcctataggaccaggaaccagagacgcaatttttattttcatcccagtcttcatccactgtgtggctttggggaaaattcccccacccctttggcctttgtactccaacagggctggcccaggcacccttcaagccatgacaaacagatcaggcagagtgagatttctgcttgtttcaaggctgcctgaaaacagactttgaggctgattgtcatatgcaaaacatatgtaaaacatatgcaaatcaccctctccatggcattcctgagctcctatacatgggtaaggcccttggagccatccctgtgtagcccctgagagcagagacactgcccagccacagaagcaactgcacccctcagctcccctcagccagctttctttgggatcctgagaaaagctcagtctccttgcttccacccctttttcatcctgcccccaccccggcacctgcccatctgccttgactgctctgagactccctcaccatctctggaggactgagggtcagggtccaattctacttccatgtacatctgccttgcactgggcctgtcacccattgtatcacatttctccctcactgctgtgaaggtgtcaggatccccattttacagacggggagattgaggcttagaatgaggcaacttgtaagatgtcaactgctagaagagtgaatccggacccaggagacccactccaccaggctaccttcccatgagctcctgagtcagtccagggcagagaaagaagaatgggtagggggaactgggtcagccacttttcaacttttgcacccctgaggcagaaggcttccccactcatggagctggcactgatactccaggcagagaagcaaagctgccgcctgccagatttccagagccccatcagttgatggcatctgaaagagagccaccacagagcgccaccactgtggacatgatccctgacctgccccagaggctgggcttctcccctttccctcctgctcagccccagcactgcctaagctcccactgcctccctaagaaagatttgggagaaatcagaagtcaggggccagatgttccagttccccataggaattcttctttccctggccaaatccaggagaggccacgtctttggccgggtagatgtttaggagggaaaagggtgaaggtcccaaccaccaacacagcccccagacttccactagcaccctcagccagctgagtccagcccagcccacctcctacccacaccccagcaacagcagcctcagcttccacctccatttctcctaccttcctaggaccctgctccgccagaggcccattaagttgattaagaggcacattccggaaagaaggagccatatttcagctcctagagaaccctctgccctcctccacctccatcccttccctctctaatgttcctctccttctcccctctgccaaggtcctccccagcctgccctggccccatcactcactgtctgatctcccagattctggggtacagaaatgttggccagactccgtcaggacttcagggcggggctgggccaagactgggcccgcctgacatttgagacaccagaatctattgtattgatcatggaatttaatcctctcaacagccctttcaaggaattattacccccactttttatagatgaggaaacaaaaactgagaggttaagtaacttgtccaaggtcacctcattaagccacaacaccccagcctttcttaaaggcaaggactgtgcttcccctgctcccctgcaaagcctcccccacatcccaccaccaccaagtctggcttctcccacccacttcccttcagaccacccagcccagcctgcccagacatcaactcagagattaaatgcatctgaatcacctgggaagttggttaaacacagattcctgaaccctctcccagagattccaggcctcccgtgggcccagagagctgtattttaacaacctcccttagtggttcagatttgctgataggtttggaaaccactttattaatccaaatctttcattatacagatagaaaaaccaaggcccagagaggatatgtaataagtccaaggtcacataggaaaagcccaaagtaggacctaagccccaattcactttttgcccggaggtccatcagcagagagcagccaggccccagagcttttctggcactacccctaccctcacccctggcccccacttccctccaagtaaccaaacatggaaagctcaggcagggcatcctgtgggaaagaagtgatctgatgaccccacaccgcttcccttctgggcctggcctggatgtgccttgtggaaaggtctttgcattctctaagtctcccttcttccatctgttacttgggtctctgagatgtgccctttctgccttctgtaggggagccaagaaccgagaatgaaaacacaacaggggccaggggcagtggcctgtcatcccagcactttgggaggctgaggcgggtggatcacttcaggtcaggagtttgagaccagcctggccaacatagcaaaaccccatctctactaaaaaatacaaaaattagcagggcatggtggcacacacttgtaatccctgctacttgggaggctgaggcatgagaattgcttgaacccaggaggcggaggttgcagtgagccaagatcgtgccactgcactccagcctgggcaacagagcaagactccatcaaaaaagaaagaaaggaaaggaaggaaggaaggaaggaaggaaggaaggaaggaaggaaggaaggaaggaaaggggaggggaggggaggggaggggaagggaggggaggggaggggaagggaggggaagggaggggaggggaggggaagggaggggagggaagggaagggagaaagaaataaagagaaagaaagaaagaaagaagcaagaaagaaagagagagagaaaggaaaagaaaagaaaagaaagagaatacaacaagtgcaagaagtgactctagccagttcctgcgacagtgttgggaatgagtcaccaggtaagatgtcgatccacccccaaaactttggggtttgtgctcagaggcacaagcacttggcttgctcaggataagagctcatggctgtgccagaaggatcctcctcagaggggcccttgactgcagggaagccacttgtttttgacaaatccattacaccttctttgcagctgttatccccactggatggaggaaacaaatcagggcccagagacaacagtcgggtggtcaacctgctctcagagtcacctgggacgtttctatttttaccactgaagttcctgagtccctgaaaatcatcagtttcagaaaaaccagaccggaggccactcaggacaatgagcagcatgctcagggtcacaccgcatgcgtcctatgggcctcctgtcccctcccgccccaggggggattttttttctttttatggtaaggaatagtagtgatgtccaggcctgcaaaacacaaatgacaataaacagcaacaatactaacataatgtttcttcagttctaagatgccattgattttaagttaaagtcaagttaacagcttatcaggggcaaaatgggagctgtattacattacatgtaagatgcatcatgatcccagaatttaaatgttggaaagaaaaataatgggggtcttcaaattgaggaaatatttcagtgatcataacactaacagttgcacagcccaacacatgtaggggacttgtccattgacaaagccccactgagtgtgcaggtgttgctatgatctccgctgcagtgagaggaaaccgcccacggtttcccatctaaactcaggtgtaggtctgtctgtcctagtggacccacaaacctccccgtccctgaagttctccatcaggctcctaggagcagatgtctcggccaagaagggtggagtcgagggaggctctctgtacccttctggggactaacagcattagctccaactgtgtaataccaatggcctcataatttatatagcggttttcattacctcccttttccaaaggcttgttcaataaatttccattttatgaattccaaagtgctctgtggaatatggagctccacctagctccaattgcagtggagaatggagggggctagaaagacagtaggggtctccccccagatccccacaggccaggggctagacagctcacctgtgcggggtgggggaagacccacaggaatggagaacgccaggctgggaacaagtcctggtctctctccacttcctggcttggtgagcttgagcctcaccttccacatctgtaaacacgggaggggtcagacctcctttgtggattgttttgagaagtaaatgagataatgggagtgtaatactatacctggcacgctgcagttatatggcaagtgctatttttcttccttgtttgtaaccatctccctgtttcactcaggtagtcagttgcccctcctctggggagcccccaggattggccacactgaggcctctcttcctctgctcttaataccttcctcagcaatagaaggtatattagtacttaccgatgtggaaaatctccaagacatattgtaaagttaaaaataaaaaagcaagatgcatttcaaaataaccaagacagtagattttaaatgtctcaccaagaaaaatgataagtgaagtgatggatatgttagcataatctaataaattatgccaatttatcattaattagcataatttaatcattccacattgtatacatatatcaaagcatcccattttaccccataattgtatataattatgatttgtcaattaaaaataacattaaagaaaggaaggaaaataagatgcaaaccagtttgtagaatataattccaattcaatacaatatatttttacatggatgtatgtgcaaatacatatatatgtatatataaagagaaatcatagaaaaaccagcaagtagatttcgccaactattaacagtttttaacctctgaaaatgggacttagtggtgaggagggaaattttaatttatttttgtgtaatttagtttagtgggattgggggtgacttttactttgcagttggtattttttgtatagttttctaatttaaaaggaaaataaaaagatgactcctcccctgaagaatatgaaatatcctccccttttactgctccaaggaagatgctgccagaggttagatgtccaattttaggtgccatggacactttgaagccagaaattttgaggggattttttttgccctcacgtgaaccaggctctgggccctgttccctccctcatatccactccagtctctgacccctgtcccctccccgctcgcagaggtctaaccctgctctcccccggcatgagcctggtgagtttgggtaccctgagtctctcttggagggtgactaagggccaattaggaactgtagctgcgtctcttaccatcttggagatgcacctgtacccgctgcagtcgccacggcaacacagctataccgggggtgctgcccaggaaacaggttgccgggaaacagggctgaggatgagcagggtctcaccagaaagaagccctctcccctgtttttgaggaggaggcaaacagaggggaaaccaggcaaagatacaacccatcatcggtggaggcagagaggcctaacaagtctctccccagccctggcctcagtttccgcactctgtgaagaggcaacagcaggtgaatgattccttaggaccctttctgggcctagcagttggtgaactggctggagaagggtaggcccagagccagggtaggagtctgggctgtggagcagaaagcctctgtctacaaatcagttctgtcacgagtgctggacttcccctgtgccttaattccctcaactgtgtgaacaggaataatagaagtacctacctctcctggtggttttatagaataaatataattcgacttgcagggtgtaaactctcagatatttcagctgttgcgactaaaatccctggcacatagcaaacactcaataagcatgtgtgatcgttagttattctccctcatcctagcaggtcccagacagcctgcaccctcaactgatccatcagaaattatttggtaagcactgacagtctgccaagctttgttctaggccctgaggatacaaagatggaataaaacaaataagtcttcccatgtgggacttgcagtctagcagggttctatggccttcagcccatggagggatgatagtgacactgtgtgatctgtgctgggatggccaaagaacagagcgaggggcaagggggcagggaaggttgtcctgaggcagcaacatctgagctcaagtttgagtaagaacctggcctgggagagaaaggcactcctggcagggaacagcatatgcaaaggcaccaaggtcagcatgaccagtgagattgtctgggggaatggcaaggagcatggtcagctacagtggagattgggaaatggaaagtggagagtgctaacctggagaggcaggcaccaggcagactgtgaatggccatgaaatgaatgccatcagtctgaggatgcagagagctctagggagtcttaagcaggggagggacaggaggacacctggagggggcaaaggcagaggcaaggagagcagcaggagggcactgggccaggcagaggccacagggaaaccttgtgctcatggccctgctgactcacccccaactcatcccatgggtgctgggcatgatttgaagaaacagccaagtgcagaggctgaagcaatacctttgtcatttcctcatgagtctcccagtgactctaatggccagacccaaaggagacctcccagacagtctgagcaactacaggatcactggaatcagtgctgtgtctcccaagagaatgtaggtgcagcgggaacgctcagtgagatgtgccgcatccaatctatttgttccatagaaaatccaggcacagggctgcatagttacaccttggatttggtgtcagaggctcagaggtggaagaggacttggagatctcactatctggcccttagagatgctgcaactcccctaggagggagtcacctcattttccccaggccctttctttggaggccaagagcgctttaagctccttggcacgctggagctgctgtgagcaggaaacggggatggcaaagtttctgcaggcgggagcccggtgacaccctccacccctagttctacagacaaggaaacagaggatcagtgaggagtgactggcacagtgagtcataagcaagtggaggtttgcagctcctggaccaggtcacctgccagcctcctcctctatccttctaaagaacaaagcaggctgtgtctgaggcccatgtcaccacggaatcttggctccagcctgaacctgaggcagcctgaagagctagacctgctcctgttctttccttttcttttttgttgtaatcttttttctttcaacctgaccttgagctcagcttggtttgaggaaataaagtgagggttctgaatggcaggagggacggggatgaaactcagggctcagagcaagactcagccctttctggttccccacgggccccaggatttttacgttttcagctggactcaaaatagaaggggtttggaacaaagccctagaaagggtcatcactcaacttggaggctaagagaagacaaacactgggcattaggaacacaggaagcacccacttataaccccttggcctgtgagcaacctactttaagcaccagccagctggagccctcctgagcctctgtgagtcttcccctgtcccacctgcaactgagaatacagcaggaggggagggagtaaaatgagggagggctcctcccactagaccatgaggtcctgaagggtaggaactggggcttattcatggctgtgtcctcagcatcaaacacaatgaactgcattccctctaagttcaataaatatgtcatattggaagaaagaaatattaattaagcacatattatgaaccaagctttctactaggagaattctcatattttgcctcatttaatctacacttcaacatgctcagagaattgtggttgtccccatctggcagaagagggtctgaagttcagagaggttaactttacttcccaaagtcacatagctcatgagcggcagggttgagattcatactcatggcagcctggccctgaagcctgtacttattcctcctcaccttgccaccctctgatgcaggggagcttcaggggagagaacacctagctctggcaaccaggccgcagtggagcagctcctgggtatggaatcctttctcagctctgcagttcaagctttcatttcagcctggttccgggaacggggccctgagtcagtgcctcatttggtgtttgagcataaatgtttacaaggaaatggagttcttcaagtgactttttctccaaatctgacctttaggacttgcttctaaagggcacagtgtctgcatgtctacaagaggctggggcactacattaggaagacaggctgggaaggcaaaggtccagggagaaggggacagtgtgactcccaagtagccgcctcatcctcctgccaccctgagattaggatgcaggtccctcagtgaggccagccagtgggaggagaggaacttcatgccttctgagaaataagtaggtgccaagcccctcgtgtgtcccttcacagccagggctgcatttaatcctcaaatagtcctgcgaggagagcgcttttgtccccattttatagaatgcaaactaagcctggaagtagcagaatcaggcttggaacccagggcgtctggccccaagtctgcatttttttctgcagcatcacactgcctgagggccaaatgtccctttgttggctgtgccagcagccaatgtgtctctctgctctctctggggagggggacatagtctcctggcaaattatcagcaaaatgggcccatggaagtggccccccagcagcagtcaaacccctgccactttctgaacccctccttgctcaggggtctgacagattctgagtcctggggatcattctccctgtcactccagggaccacagagccctgggaaactcaaaaagcctggaagtctgcacccagaagaccatgaaagatgctctcaaccaatcctctctgtgtttgacagatggggaaactgaggtgcagagaagagcagggacctagccaagtccaggagcccatgggaggcaaagacacactggcaggcactcactccctgcaacctttcttgtgggagctcccagcccacacaagcccaagtccattgaacaggcttgggcacttgagctagtgtcaactggtggctctatgggtgaaggaataactgaattaatgcttccttggtccagtgggcacttgtgtctcaaggtctgagcaggagttagacggcacagcatctagaaaggatgtagttctagggacattgtagtttgatcactgtgataaagagcttagtgtgtgccaggtattccaacaccatctcaggcaatcctctattaaatgagagatcagtgtggtcacactgtcatcgtatcaatgatgacactaagcagcacagcgaggatcccggtttcctgtatcagtgaaccagtggagctccctcctcttctgcctgtcggccagagttggtgaggactgagcgcaacacccccactcccaccccagcacaccaggtgcctcagagctgggaaacaggctgagctggagcaggctgggagatggagctgtcagcttcccatctgcgtgggtgtgatgcctgcttcaagtttccgctcccattcagggatagtgattgaaggcactcgaggggaaccgtgcgttttccaggatgatgatggtgatttactggataatgactctatgtctattcttaagccgaaggctgatgccaggtgctccctcctacagtgacctgggttcttcctagaggcctgcttcccacaagtgccatgccaagtcgcagggaacttttgctcaggcccagggagtacactcgtagaccatcaagggctcagcctctctgaatcacccctgggactcccaggctgcccttggctggggagctccccagagaactctcagaccactcagactccaccatgtctgtgtcaactgtcagaggcagggagttctttcttaagttccacctagaatagaaaggtcacacacactaggctaagagtcaagggacccaaggtccagtcccagctctgggtagtcattgcccacccctgggccagaggaagaaagctctgtcagtttacagttcaaagaggagaaagtctgcaaatcactctcgttttggtgatcaaaccccagtagagccacgcagccccttggtcacttcagtcacaccacgaaacatgaagagggggaataatttcatctactctgctctctgctcttaggaccaaggtctacagctgttcattcctgtgacgctgtgctgtggtaaagaatgtccccctcctcctccataaagagctgtgccttccccatcagaatggctgggtctccaaccacacgtaagggccccgtttcccacagcaatgctgcttctcctctattctcagaccccctaaaactccttattcactaggcctcctccatagatctcagagcaccaggctggggtgaagcctcttagagccaaacccctcacctacccctaatggaggtgtttgagctgggcacatgaaaagtggggagagggcatagagatgccccaacctgccaaagctctgaaagccatccagtcctcagaagagcctcctggaacccagggtccttaggccaggctgggtgagcagagaaggaggcctgcaactgcccctccctcccagccatgaatcactccagtcaaaggagtgatgcacctgctggctctcagctcccccacagcctgctttcctgcagtcaggaccaaaagcgggacttctccctctggaggctcaagaggagtagggaaggttatgggatcagattggggttgtgaggcaggacaaagtcagtgaactggaaagaaggggccaaggtgtcttcctgtgtgttttgcaagagttctctaaggaggggcgttgaggcaccagtctgttccaacaagaggctgggcagcacagcccgcctttgcacacaatgctgtcattgtatagattacctcagatcaataaaaacagccacactttctcaagtgctttattcacacttcatatgacattgagaaatcatcaatttgcccacattacaaataagaacagcaagggatgactttagaggtgggtgggaaggtagagaggctgatgaaattatcggggagctaaagtcactctagaaaatattggtgggacatagactcccttcccttgcttcttagacaaatgagcttggtgagtttgattgtgaaatctgccagagtttctctctatacccttcctatgaaaggcagttttggggaagcttttgcacagtaagtcttgaataagtgtttgtaggctgaacaaatgaagaagtggggcctccagcccccagggcctttgggagccaggtctccaaagactaaattgctggagggtgtacaagtctgtttactccttggcagaaacacaagtctccctggcttcaaagaaaagaggcttaaaaaggcttgggcaccgaaacgcagacatcaaaagcctcctgcccactgccagccagatgtgttaagtgcaaatgaagctgaaatgtgcagattcaatttcccttgaaacgtacctgtcagcccaaaaggaaaagattggaaggtagaggcttttcttggcctactgcatcttcccctccacccagcaccaaatcccacagcttcctcatccctcttcatccttaggttgactgctcattctacgggtgttttggaaagggaaaggtgttcaggttgaaggcagagagatggacaaaatgtctatataaggatgtcaactattaaaggtgaagggaggatgctgttgtcttttttttttttttttttttttttggagaacaatgaggcatctgtctaaggatttatctgtcagccccttccccatcccagggatgcccaagtcttgggggaagaactcaattcccacacaaaggaagacagctcaactgggtaaggagggctccccttgtttgaggggacagaaacaattcatgctgcccaggagcctccaccttgatagagatttcccttgaaatggaaatctgagccctgcctcagatgagatcctagtctgatgggggaggtagctctgcccaaaacccccctgtctgatggtcagttagctttcccaatatctaataaacaagcagagctcccccagccctgcagtgtccctggatgagcctttaccagatttgccacaaacaaggacagctgccaggcatctgggcaccagatgctctcctcatctgtttcctggccatacccaaggattcagaaccttttccccattcacacttacagtctaagcagggcccagcctgagctgccctgatcacctcacccattattccccctccatcaatattcccaactgcacatcctgggaagcctggttcttggggcagaaatagtaatgtaccctcaccctggcaacagcacctgaaagtcagcaacaaaatcaggcaacagctattgagcgcttaccatgtggcaggcataggtgatgtgctggggatggaatagccaataagacacagtcttgactgtggaggagtccctgttccgagcccaaagttgacataccctctgggtcctgctgtttcccctgtacctgttggagtcccatgagagcacaaaggagggagtgattcattctctttgagctaggggtggggtacacaggtttctaccccagaggaggggacatttgatccaagccttgaaaactgagcaggaagttgccaggctggggaggaatgagcattctgtcagggagaaagaacggctcgggaagggacatatttccactgcagccagaacgagtgagactcgggggtcaggaaaggggcagccaggttgcccagcagtggttctcaaactctagcctgcatcaccggaacgacttgttagaacaaacactgccagaccccacggtcagagcttctgattcagttggcctggggtaggccaaggtgatgttggtgctacttagcagtccacagacaacacctttgagaatcatggttataaagggtcatggaaaattgtgttattactcccaattattctatttctccttgtaatagtattacacatcagctccttttgccatgtgacttgtctcttgctattggaggaggtgaagtataatttcctgccccactgagctcagccacgtggcttgctttggccagtgaaggattggcggactcaacgtgagcagagactttaaaagtgcttgcatagtttagctaggcctcttgtgatctgccattctgccttgggaagggcatgctttggcgagatgctggtcccagaatgaaagccacgtggcacagccctgaacccagcctaccacttgaaacagagctgccccagcccacctgaaggcccatgcataagaaacattagtatttgtagtcgttagccattgagatttagggagtgtttgttgtacagcaccatagcagaagtctgatggattcaagagctttgaatgacatgctaagaaatttaggagtataattgctaaatgcagagtagatcttttttatttttctttgtttgtttgtttgtttgtttgttttttgagacagagtctcactctttcacccaggctggagttcagtgacacgatctcagctcactgcaacctccgcctcccagcttcaagcaattcttgtgtctcagcctaccaagtagctgggattacagatgcgtgccaacacgcttggctaatttttgtatttttagttgagacagggttttgccatgttggccaggctgatctcaaactcctagcctcaagtgacccactcgcctcagcctcccaaagtgctgggattacaggtgtgagccactgcgcccagcctgaatgttgagtgtatctaactgggtaaaactggaggcagggaagaggctgtcaccacttttcagatgaaacacagaatgagcgttccaatgaccagagaggaggggagagaggagggaaagagccagacaggtacaaaaatgctaggccccccagaacctgatgactaagtggctgaggcgaggagggaggcaggagaagttcacatcatggccacacttctggcctggacagcagagaggaatgaagccatccatggagatcaggaaggctttctgttctgtgacgccccaggaaggcccgtcatggcacaaaagccaataaacaccagagctatgccccagcccctcatcactccatcctacacaggtcctgggcagggtgcacacctgggcaagctgaggtcagccccacagcagcatctaagggctgcagcggggggacttgccagctgagcagctgaagccacggcaatttatgctgtttttctcagatccatttggttctaagtcagctgtagatgagcttcgcccacaactgctgctcttttaatttaattgtgtggtgctggggtgtttttccccctagcaaatacatcaaaattgtcatcttgtaaataaacagccctcttcccccactcagtacccaccatgcaccagcactcccctgacatgcacgcacagcggcaacagctgggagggagggcggcctgcaagggctgtggatccccaaggaaagcaagggaggcgcccctggaggaaagtgagcaacagacgtgccctagactgccttcagagccagagagagctcagggatagagcacttccacaggcctccgctgacgggagactacagggagctgtgaacaggccagcagtaaactggaccattggggcagagacttagcctctctaagcctcagtcttcctatctgaaaaatgagccttattgtgaatcaaaataaacacagctgcaccgaggcctgtaaaatgtagagcgtttgactatctaataagtgtgttgttatacagctgtagagtagcatttataggtgcagccttgagctttatcctggcttccttactggcagtgtgagcttggacgtattacttaacctctctgtgcctccatttcttgatctgtaaaagaggactatgaagggtacccaactcatagcattgttgtgagaagtaaatgaagtacattaaagagtttagaacagagccggcacatagtaagggactgacagatgtcagctattcatgtcatatgcagaaggaaacttttattttagatgctcagcgcccctccaggttcctcagcctcttaactcccaagctgtataaagactgagggggccgggcacagtggctcatgcctataatcacagtgctttgggaggtggaggcaggaggattgcttgagcccagcagtgcaagaccagcctgaccaacatagtgagaccctatctctacaaaaaaaaaaaaaaaaaaagttaattagccaggtgcagtggcagatgcctgaagtcccagctacttgggagactgaggcaggaaggatcccttgagcccaggagtttggggtggcagtgagctatgattgctccactgcactccagactgggcaacaaagtgagacttccctctccaaaataaataaagaatgagaaggagagatgattggaggttcaggacaccacagcaagaattcttttagctgagttttcacccttgaaaaccagacctcactgtggaatgtgttgtccctccatacacacacacacacacacacacgcccgtgcgcgcacacacacacccacacacacacgcacgcacacgcccgcacacacacacacacgcccgcacacacacatgcacacacacacacatgcacacacggaagagtgacattgcagtggtaggtggcccaactagaaaggaataaagaaggggagagaagacactagcacattcccacatggcaagaaagtgtagaagtcccttctctcaggttgaggagccaacaggaagaagggaacaaaaattcattcattccagaaatatcaatgattcatcccctagtgttctcggtgctgggaatagagctgtgaagaaaactgacaatgtccctcttccttggaaattccattctgggtgaagtgatggaaaacctgggctctggcatcagcttggtggctttgggccccatcttgtcacgtttaaattttgtgatcttccacaagtcatttaatacgcctcctcaccccagtttccttcttcataaagaggaatgataattcctgccttgccatgttggtgtgatgatcaaatgagactgcctgccttttaggagctccataaatgcttgtttttaggttctacgttattttaattgtttaaatctgagcggcggagactgtcagctgtccctgctttcctaagtaatgaacctctaggttttaactgggcacctggctctccagaatcaactacatttcctagcctcctttgccactaaacttggccagtgatgtgagaagtgacatgggtacctctgggttgtgctcttggagaaggtggcctggctggccctgcagccccacagctccgtttgctctctcccctcagctagaagacagacccagtggacaccgtggtgactcctcttggccatgccaaggagggcagcaccctaaggaatggacccagggacaaccctactcagttggactgcttacggccagcctgtcaacctaggaaagaaataacttctgatcttgtttaagtgactgttactttaggtctgtgtcacagctgaccctgtatcccagttacagcaatctgggatctagacatgataacactatttggcctgagtctccacagcctgccactgcagctcaatagtgaggagtgaaaaagaacatgagatgtaagacctttgcacataatgaagtgacatgcacctgtgagctgctccagtaattctgaaggggtatgcctgagggtgaggagggtaagaatggactgatgggacatcaaggaagaagagactgggttagttactgattggatgagggcaatgaaaacacaagtctgtaaggactccaaagtatctcatttgggaaatgaaaaggatggtgctatacctagtcccatgtcatcactggagagataagccaatctggtggggaaaggtgacaagctcagtatgggacacatagagttgggtgtgtgcatggcctccagatagagatgtcccaggtgcagagagacttgggggctggaggtgtcattctttttggctgtccaacatctgaatccccttcccatgttaaaggaatccccactcttgtgtcagggctagcttcccatcgtccagatgaagagtaccagttgatcactttccagcctcccttgcagctaggagaggcacctgacctgggccagatcacacaaggtgtgctgtgcctcgttttgtcacacaggaccctgccgtattatacagaacccatgtgcatgattgctttgtcattgagaattgtaatctcttcaagctcttagaaaaatctgctttgttatgtaggcccctactgtatccagatctcattcagtacacagagcccctctttgccttctggaaatctgcttttttatccccaaacacagaaccatgccattgttatacaaaaccctgcacttgacccagaacactctttgtggacacacctgcctgctctccaggcagaactccactggttctccagaactccactctgcttcaggatttttcaacagactccaatattgatatccagagatcatctttattctacataacccggatttgttacacagaaatttacccggctacacagaatcctgcctttttcttcagaactgtgcttcattgtgccaaagccttggtaattttacagaaatctgaattcacagaatccagctttgtatggagaaacctggtgtgctatggtagccctggcccattaaagagaactcagcatcattaagccagcattgtttacttaaaccccttcactggggcttgggatcctgctgttggcctgactgcagcctgacaacttcattgctctaaagaaactgacttacctacacagaaccccctaagcattcagacccctaatttttatgtagatctacagaactggtacatagaaacctaaggggttacacttgttttatacagcttcgtcctggtacatgaacaagaatagcgcccagtatcacattggtgtcttttttttttttagacggggtcttgctcttgttgtccaggctggagtgctgtggtgtgatctcagctcaatgcaacctccacctctggggttcaagcaattctcctgcctcagcctcctgagtagctgggattacaggtgcctgccaccacacctggctaatttttgtacttttagtagagacggagtcccgccatgttggccaggttgatcttgaactcctaacctcaggtgatctgcccaccttggcctcccaaagtgctgggattataggcatgatggtgtcttttctaagaagctcgaacttgtacaagcctctgtggggccagcaatgcgaaagaacagcagatggatccccttcgtgccaccctcactttaggtgacgctggaagaatctgagctgccaaaatcagagttcaggtccccttttctcccccaacctaccagagaggactcaaacttgagatgtgcagagtaaggtgcaggcagaaactgtagccaaggcctcagggacggggatgagcactcactctgcttctccttggtgctggccctggtctcctgggcacaaatctacttggacagaaataatcagccaaattaatttagctttaaatagcagcactgagaatgtttccacaaaattttctccgaggagagctaagcagaattaatgatggcacaatatcagagagaaatgttatttattaaggcctaatcattccagggaggggggaagtcatcacacaaaataaagtggaaatcagccagctcagtccagccctgctcagcccagcagccaaggaggggccctgggaggctgtgaccaggggagcctcgtagtctggtttcctgcaaagccaacagcgcctgctggggtctccttggtacttgagggctgggcttccctgttccaaccacattcctcgcggctgtgtccacaccagctcatttgttccatgctgatcccctctaaagggaaacagcctcaactgcacaagacaccctcaaggaataaagttccctaagagaagaaattgtcccacccctccgcacttcctgctgccccctccttaaaagttcctttgttcatttgttctttcaactaatatttagtggccaggtacggtggctcacgcctgtaatcccagcactttgggaggccaaggcaggtggatcatttgaggtcaggattttgagaccagcctggccaacatggtgagacaccatctttactaaaaatacaaaaattagccaggtatggtggcttgcacctgtagtcccagctacttgagagactgaggcaggagaatcacttgagccgggtggcggaggttgcagtgagccgagatagtgccactgcactccagcctgggcatcagagtgagaatccatctcaaaaaataaaaatagtgagtgcctacacctaagagccaagccctgttgtgggtgctggggatgcaacaatggaggacaggcaaacaagtaaatgaacaagatgatgtctgtatcaacagtgtgatgaacacaataaagggacgagagcaatgggagagggtggggatttagatggcctgatcagggaaggccacggggaggagacaatatgtgagccgagatgtcaagaaggagaaggagttggttctgtgaaggtctgagtaggggcagaacacccagggagagggcacagcaatggcaaaggcctggaagaggaaagaaggccagaggagcttcggcccagtgggccagggagatcatggcagaggctggatttgttctcttcagagcagtaattatattacaaagagggcagggactagccaaagttggagaacactcaaaagcaagatgaaatccaggggagaaagggtgaggggccacttactgggcaacccctgttcaccttgaggtcttctcccatgatgctatggccaccaacgtggccacagatgtgacactgtgtgtgttactgtgaggactgtttggtccctacctaaaggggttgctgtctactagaaagggcaagacattggttccattcacgagacatttattaagcaactactatgtttcagttgccattttccttaagacattgacacagtaaaataggtctgaagggaactggctcccatctgctgggggcgcactgtataggggcaggcaggggctctgggtctgtcgtccaaaatgcaggttctgcagtcatagagtcctgggtttaaattcttactaattaactatatttcatgctggacccctcttaacttcaatagagatggcaccaggttcaagaggccaaagaaaagacccagagccagcaaacaaggcacagttgtgtttttgttgttgttgttgtttttgtttcttgttttttgttgctgttgttgttgttttttgagatggagtcttgctctgtcgcccaggctggagtgcagtggcgcaatctcagctcactgcaagttccgcctcccaggttcatgccattctcctgcctcagcctcctgagtagctgggactacaggcgcctgccaccatgcccggctaattttttgtatttttagtacagatggtgtttcaccgtgttagccaggatggtctctatctcctgacctcgtgatctgcccacctcggcctcccaaagtgctgggattataggggtgagccaccgtgcccggccaatacacggttttattagcaggaaacttacatacagagcagcccagtggtggcaggctgggcaggagaactatagccacttacaaggagcaggcagtttatacagcattttcatttagcattctcctcctggcaatctctatcaggcaacctatatttaacccaaaacaaagcaccttgatcccccatacaaaccacatttcaaaggacaggctggaggttcagatgttcctcatagataagaaatgaaactctaagttggccattcctgggttccttagctcggaacacagtcagatgcatctgccatacaggtcattctcggggtatgcttaagttactgctgtcaggtgcatctgccatataccatacaactgtaggtaagatgtagaactcctctgagcttcagtttcttatgctgtgaaataggtactactacctaccttgcagaattatttggagtattaagtggatgaggatggtcctgtggtacctcataaactctccaggatcacagaggttgccctcagtcagaatcacaagccatcaatggcttgggtctggagtatgtgaggaagagtagaccagaccttggatatgttatatcagtgggtacaggactcagtacccatcctgctacaggaaacaggactcagtttcttctctataaagtaagaatggcaagccttccttcagatgggtgcttaggatcacatgagatgctacttgggaaacacctggtccaggtaactcaattactgccaccctcccactctgtattagtctgcttaggctgtcataataaaataccacagaccaggtgtcttaaacaacagaaatttaccttttacagttatggaggctggaagtccaaaatcagcatgccgacatggtagggttgtggtgaggactctcttcctggcttgcagaggccgccttctcactgtgtgcttacaaggctgtgcacactcatggagaaggtgaggagggagaggaggaggagggcgaggagggagaaggagatgagggagagggaaaggaggaacagggagagggacaggagggagaaggagagggaaaggagggagagggaaaggagggagagggagaggagggagaggaggaaaagcaggagaggaagaagagagtcagggaggagagggagaggaggagagggagaaggggaggagggagagagggaggtgggaagggggagggagatgagggagagggagaagagggagagggcgttctctggtgtctcttcttataaggatactaatcctatcagattagggtgccgcccttatgacatcaggtaaccttaattacctcctaaggccctgtctccaaatacagtcacactggtggtcggggcttcaacatatgaatttcagggggcacaactcagccatattgcgtcttcctcatgctgctcagaggctgccaacaacagctgctcatggcaacggcaagggctttccctgggctgagcgtccctgggtctggaggccttcagtcagcagctcgagatgctcccctcgggcttctgaaccccagctccaggtccctgttagaccttattgttctacctgagaccattccctaggaagaaactgaagtcagaagcaaaattagagatgagaaacctgattcgcttgtatttctttacatcagttgctctaaacagtggattcatctcttccttattcatcttgttgttctagatagacttgaaaatcctttctagtgttagatttttttttaacttcagagaattctggatgaagacttcctgctaggcagttgtggaagtaagtctccagtcagaattcttggccagacatgaaggtctcttagcactttaaaaggcttctgttttagtccattttctgttgcttataacagaatacctaaaactgggaaaatttatttaaaaaaaattttgtttcttacagttcccaaagggggatgtccaaggttgagggagtatacgtagtgggagccttcttgctggtagggactgtgcagaatcctgaggcagcacagggcgtcacatggctaggaggctgaacatgctacctcaagtcccttttcttcttcttataaagccaccaatcctactcccatgataacccattagtccattaactcattaatccattaatccatgaatggattaagccattcataagggcataaccctcatgacccaatcacttcttttttttttttaacatacacatgcacgagtttattatttggaataaaggaaagacattatttcctttcttttcagggtaaattggaagcaatgtaacaggaacaattacaaatgcatacatttatatgtatgtatatactaaacacttttattttattttaagttccaggacacatgtgcagaatgtgcaggtttgtttcacaggtaaacatgtgccacggtggtttgctgcacctgtcaacccatcacctaggtattaagcccgtatgcattagctatttatcctgatgctctccctccccttgccccccaggcaggccccagtgtgtgcggttcccctccctgtgttcatgtgttctcgttgttcagctcccacttataagtgagaacatgcagtatttggttttctgttcctggttagtttgctgagactaatggcttccagctccatccatgtccccacaaaggacatgatcttgttcctttttatggctgcatagtattccatggtgtatatgtacctcattttctttattcagtctatcattgatgggcatttgggttgatttcatgtctttgctgacccaatcactcttaaaggcccatctctcagtactgccacattggggattaaatttaaatatgagttttggaagggacaaatattcaacccatagcagcttccttctcttagattccaaaagattaaattcagtcatttatagttgaaacaacatggtagacatgtatacagctcacatttcagaggcaaaatctcaggctggcattggaattcatttcagcccctgaccactctcactgactcccagggccatgaggatttctcgctaggcctcaggaatgatctttgacatcctggcctatccttcaactactctgatgcatgggaggtggacctgcatgccctttctccaggtaagaagttctctgtcaaagcatgctctactccctccctgctacagaggataagtctcctggattactcctcattaatcctaaaaacatgtagccacatggaggcctgttgagtgtgaaatgctccgtttctgttgggacctttctggagcctaaaactaaacataaatgaagaaatcctcctatttagtcagactggcttattaattttccctctgagtaagccatggggatttctgtgtcctgaaaccttccctctgctctgttcatgcctaggtctcttctctctgctgaaaaggcctcactgctactccaccagacggacatttgggatcatgtttctcttaccgaatcaatcatcaatgcctacatattctccttcctaagtatagaattatgcattccctaccttcctgcagtgaacatctgtggctcttgccagcctagcatccattcctccttcttctgataaggcaccctcatgtcgtttggagaatggccctccccagctctctgtccatgtggattgatggggtgctctaggttgaccccatagcccagctgcatgggtaagcatacgacctagactcagccaatcaaggtggtctacatccctgaccatagtaattgatttggggatgggcatttgacctaatctaagccaattagagtcagatcctggacttgtgtaggatctgttgggatttgtgcagggcgccttagctgttaaaggttaggtggacatgttgatggccaacttaccaccgtaagggcaatgattatttgagaagcaaggctgagagatgggaagaagtggtcttggagtgtcagttagcttttgtgggtaataactgaccacgatacatcagctgcataccacaataagcttttattctcatggatgcgcaggtcggctgcagttcagttgaactaggtcaggctcagccaggcagtctgcttcaggctgggctggttatggtggctctgctccacatggtattacctaccttgggccagcaggctagctagttctcataaaaatggcagagggacaagacagcaagcagaaacacctaaagtctctcaaggccaggactcagatctgccatttctgctccgtcccatgggccaaagcaagtcacatggcccagcccagcgtcaaagggaactgaaatccactctactccctagtggaaggaactgaaatgtgccattaccaaaggcattcgtacaaagaagacttaaggcttggggccaggaatgcaatctacaacaggtggtctcatttgagccctaggtctagctgaaccagagtcagcttcaccacttgagtccagttgatctccttccccaatcttgccctgctcataccttgacagactctgtgttttgtttaaccacagaggcaattctcttctaaaagaagagccctaattcgtattgattcccctatgtgatgagcaatgtgctaggagctgtcatccattctcacacttgaatcttccagtggctctgtgaggtggccgtgaacatccccatttcacaaacaggaaataggatcagagggcttgtgtaacttgtcggaagtcttatggtgaggaagagctgagtggccggggttgcaagtccaggtggtctacctgagaatgaagctcatgctttttccactttgtaattgtgactttttaccctgaaagtgggtggcacagatcctatgccccgtcctactctcagccagccaaactaataataataacagctaatgtttcctgagcccctgctgtgtgcaagataatgtgctaagcatttcaaatgcattcacttgggccatctttacaaaagccctgaatgtaggtattagtatcattcccatttgacagataaggaaactgagcctcagaaaggttagaaaccacccggctagtatgtggtggggccagggctccaacctctcctatgtggcagcaaagcctggcttcatggcctctgttcaggccaaagggaggttcccttaaaaccccttaaaatgctgagggagtgaaggggcagaaaggtcaaaggcctctaatctaaaccaccctgcctcttctcaggaaaccaatcctcccacagctttcccagcccccatgggttcttgggtcactcctcaatgcctggtcaccagcctctgtgccaatgagccaaccctccctttggctgcagacgtgataaatggctccaattatcccctctgagctctgatttaatgtaatgttttattaatgacaactatcagaggaaagcaaagagcccactgcataccagccgcctgcctccatgcagaagcatgctctctgggtacagaaatgaaagggtgggaggggaaaagcaccacccccaaccccaatcccaaggcagggaaacagctcaccacccctccccacgcaggcctcgggctgaatgaatgccacttttttgcctggcatattccacccattactaatgctttgccgcttccttgactgacaaattaggggtttgaacaaaatgtggtgagggaggggggagatggcagctgcccaccctgcaattaagaagggggtgagagaaaaggggggccaccctacaaacattccttcatctctcccagctttggctgagtgtttcaggagtgggtgtgagtgactctgtgaaccactgtgagctctcctctcagaacctgccttctaggtcctcccactggtccaaggctgacacttgtcccccagccctcagatctgtcacctcaaagcatctgagacagactggacaggtttcatttgtcccattggacagatgggaaacttgggtcgagagagaggcagtgtcttctcccaggtcacagtgggaacaaagccaggactgacagtcaagcccctgactcaggctgggatcctcctcctacacaaagctacattaaatggcagggcacagctttagtggagaaggggctggatgtcttctcccctctaccaaagcagagtctgagttattaggcaccggcgaattctgcaagggcgtctctatgtgtgtgtatacgctaagacccacctgatactgtgaaagcttcctcggtattaaggtggtagaaagcagcctgacgttattcatttagcaacagttactgagtgcccaccacaggcacctgcttgggaaataatgaaggacttattattattattcccagacctcacttcaaaaacattttcaaaagttaatgaaccatctcaataccctcaaaaagtgctgtaaaggacacaggcacagaggccatgggaggcccagaaggggatacctaagctatccttggtgggatgaggtcaaggaaaacttcccggggggagatgtccaagatgaggctgaaaagaataggaattagccaagtgaaggggatggaaggtgatttgggcaaagggataggggagagaactttcaaggggaagaatggatggggctcaaatttctcggagaaggaggcattggctagagagcccaaaaatgcaacagagtttagagggagccaggtcctacagggccagggtagggaagctgtgctcccttaccctgccccgaggagcaattacagcttcaagcagggaagcgaggtctgcactttagcaaaagcatcccagccgcctgtggagaagggacggagcccagcaggactgtgctgggtaatcagcaaaaggctgttacagaggtccagagtagggagcgggaggtccaggctgtggcttgggtttgggaaggcggcaagggagattcaagatatgctgaggaacttgtagccaactgaccgaggcaggcagggtggggaagaaagcatcaaaatgctgctgcatggtggctcacacctgtaatcccagcactttgggaggctgaggcgggcggatcgtgaggtcaggagtttgagaccaacatggtgaaaccccgtctctactaaaaatacaaaaattagccgggtgtggtggtgggtgcctgtaatcccagctactcaggaggctgaggcaggagaatcgctgaacctgggaggcggaggttgcagtgagccaatatcgtgccactgccctccagcctgggcaacagagcgagactccatctcaaaaaaaaaaaaaaaatgctgctgcctggtttcccacgtgggcaatttgctggagcagctagagaagaggtctgtgaggggtttaaggagactttaaatgcataaagtcagataaagctaggcttcccggggcactcaagctgagtcaactgagatggtgataatgggaattgatgatcaaatgcctcctggcagtaaaacctagcacctgcaggacatggctctggaggagacctcctccaggtgaggagccaggctggacctgtgatgtcacctccctctacaactctattccttccatccctgggttctccaccatgctggcctgctgggcactgctgctcttttaactctttttttctttcctttttcttatttgttaacatagtataaaattgactctttttttggtatatggttctataagctttaacatgtatagattcatattctccactgctacggaatagttctatcatcccagaaaactctctcaagctgccactttgtcgtgaaaccctccacccctcctaacccacagcaatcactaatctgttctgcattactattgttttgccttttccaggatgctatataagtggaatcatgcagtatgtgaccttgggatatcggccttcttccactcagcacaatgcctttgagactcgtctaaaatgttgtgtgtataaatcattcctttttgttgctgagtatttcattacatggatataccacattcactcacccactgaaaggcaaaggtgttgtttccaggttttggtgattatgaatagagctgctatgaatattcacctacaggttttttgtgtgaacatgagattttatttctctgcaataaatacctacgaatatgattgctgtgttgtacgatgtgcatgtttaataagaaactgccaaactgttttctagagtagctgtaccagttgcattcccaccagcaaagtatgagtttcagtttctacacatcttcaccagcagctattattgtcaacttttttgtttcagccattccaataggtgtgtaatggtatttattaatatttgtagttttattattatttatttattttgagatagggtctcactctgtcacccaggctggagtgcagtagtatgatcatagctcactgcagccttgaatgcctgggctcaagcaatcttcctgcctcagtctccaaggtagctgggactacaggtgggtgtcaccatgcccagctgtattgtggtcttaatttgtatttccctagtacctaataatgttgaacatcttttcatggcatccatatattctctttggtgaagtgcttgttcaagtcttttgcccatttttaattgagttattttctcattactgagatttaagagttctttatatattctggatacaagtccttttgtcagatgtctgatttgcaaatattttctgccagtctacaacttgtcttcctattctcttagaagtgtctttcacagccgggtgtagcagctcacgcctgtaatccctcccttgggaggccgaggtaggcagatcacttgaggccaggagttcaagaccagcctgaccaacatgacaaaacctggtctctactagaaatacaaaaattatctgggtgtggtggcacacacctgtaatcccaggtgcttgggtggctgaagcacgagaatcgcttgaatctgggaggcagagtttgcagtgagctgtgaatgcaccactgcactccagccttctagcctgggtgacagagcgagacattgtctcaaaagcaaaaaaaaaaaaaaaaaaagaaatgtgtttcatttagcaagagtttttcattgtgatgaagtccagtttatcaaatttttgttttatgggtaatgtttttgatgtcatatgtaagaattcatctagctccaaatcactaaggttttcttctattatttcttctaaaagttttatgttttaaatttaagtcaatgatccatttcaagtgaatttctacataaggtataacgcttagggtaaggttcgcttttgtgtatatgaatgcccatccacttcaatatcatttattgaaaagaaaaactgtcctttctccattgaattgcctttgcaactttgttaaaagttaaatgatcttttttatagttggctgtttctgatctttctattacgttccattgagctatcatttttctctctgtatatgtgtctttatttttgccaatatgacactgccttaattattgtagttttttttaaattttattattatactttaagttttagggtacatgtgcacaacgtgcaggtttcttacatatgtatacatgtgccatgttggtgtgctgcacccattaactcgtcatttagcattaggtatatctcctaatgctatccctctcccctcccccgaccccacaacagtccccggtgtgtgatgttcccttcccgtgtccatgtgttctcattgttcaattcccacctatgagtgagaacatgaggtgtttggttttttgtccttgcgatagtttgctgagaaatgatgatttccaatttcatccatgtccctacaaaggacatgaactcatcattttttatggctgcatagtattccatggtgtatatgtgccacattttcttaatctcgtctatcattgttaggacatttgggttggttccaagtctttgctattgtgaatagtgccgcaataaacatacatgtgcatgtgtctttatagcagcatgatttataatcctttgggtatatacccagtaatgggatggctgggtcaaatggtatttctagttctagatccctgataattatggtagctttatagtaagtcttaaagttgggtatggtgagttctccagccttattcttcttttgcaaaattggtttgtctattctagttcctttgctttttcataaagtttagaattagcttgtctatatctacaaaaaaatcctgctggatttttattgaaattgccttaaatctatagatctacagagaaaataggcatttttattgtgttaaatctgctaatgaatgcacattatatgcctctccatttatttaagtcttcttttatttctttcaccagcattttgtagttgcaggatatagaactgctacatgttttgttaaatttatatctaagtatttcatatttctggagctattgcaaatgatactgtttctaaatgttggtgtccaattattcattactagtatatagaaatatgatggatgtttttgtgttgattttgtatcctgcaaccttggtaaactacatcttggttgtagtttttctatttgtagattttttgaaattttctgtgtaggcaaacatttggtctgtgaatggaaacagttggatttcttacgttcagtctgtatgcctttatttatttatttcctgattgtactagctggaactgccagtggtgagtgaaaatccttgacttctcccaatcttaggaggaaaaaaaactctgtgtttcacattaagtatgatgttagttgtaggttttttatagatatcctttatcaggtcaaggtagttcccttccatttccagttttctgagagttattattaccaatcaatgttgcattttgttagatgtgttttctgcattcgttgatatgattgtgtggtttttctactgtagattgttaatatagtggcttacattgattaattttcaaatattcaaccagcttggcattcttgtgataaaccccacttagtcatggtgagttgctctttttatatgtttctggtatcaatttgctgatactttgttaggaaatattgtgtctatgttcataagggaaattgatctatagttttctttgtcatgtgttttctttgtctagttttgctggcctcataaaatgatcttggaagacttttctcctcttctattttctggaagagattgtgtagaattgcgttattcttctttaaatatttggaagaatttgccagagaaactaagaggcttttaaaaaagaattgtatctacaaattcaaattatttaacaatcataggaccatttaggttatctactttatcatgaatgagttttggttgtttgtggttgtcttagtttggcctggtataataataccaaagaccgtgtagcttaaacaacaaacatgtatttctcacagttttgaaggctggaaagtccaagatcagggtgcccgcagacctggagtctggtgaggacacccttggttttcaaatggccatcttctccttgtatcctcacatggcagagagaactcacctctcctgtgtttcttcttaataagatcactaatcccaatcatgagggcttcactctgatgacctaattacctcctaaaggccccatctaataccattacagtgggggttaggatttcaacatgcaaatttggggaagacacaaacattcagtgcataacagtggtttttgaggaattggtccattttatctgttgtcaaatttatgttcctggagttgtttgtattattcccttattatcattttaatgtttgtaatgatatcccctctttcattgccgatattggtaatttgtcttctctctcccctgcttctcttttctttatcagtcttgctagagtttgaccaattttcttgacattgcaaaaaatcagcttttgatttcattgattttctttattttctgtttccaatatcattgatttctgtgctccatttttcttctcgctttggacttattttactcttccttttctagtttcttaagaaggaatctaacactattgaaacctttcttctgttctaatgcaagtatttaatgctataattttcctctaactactcctttagctgaatttcacaaatttttatatgttgctttcattttcatttagttccaaaatattttctaatttcccttgaggcttcctctttttctcatgggtgagttaaaagtatgttgttgaattcaatgcacctgggagctgccaggcatggtgcctcatgcacccagcacttcaggaggccaaggcaggaggatcgctcgagcccaggagttcaagaccagcctgggcaacatagtgagacttcgtttctacaaataatacaaaaatcagctgggcatagtggtgcgcacctctggtcccagctaatcaagagggggctaaggtgggagcatcgcttgaccccaggtggtcaaagctgcagtgagccatgatcataacgctgcactccagcctaggcaacagagcaagaccctgtctcaaaaaaaaaaaagtacctgggagatttttctgttatctttcaattattaatatttggtttaatttcattaaggtcagagaacatacttcatatgattttaatttaaatttattaagatttgttttatgacccattatatcacctatcttagtgaatgttccatgtgcacttggaaagaatgtgtattctacttttattgggttgaatgttctgcaaatgtctgttagatccagttgagttgatggtgctgttcaattctatttattttctgtctgctaggtctatcagcaactgagaaaagagtgttgacgtttccaattataattatggatttgtttatttctcctttcaggtctgtcggtttttgattcaagtattttagagctctgttgttaagtgcatctacatttagatttttatgtattctttgtgaatttactgttccgtcattatgtaacaacacattttatccctggtgactttccttgctctgaagtctactttgtctgatattaacatagccactcagttttcttttggttagtgtttgcatggtatatatccttctatattttgacttttaacctacctatatcactatatttaatgtgaatgtctcacaggcagcttctttctttaatccattctgatgacgtctacattgaaattcgtattagaccatttacatttaatgtaattattgatatgtttggatttagatctcccattttatcagttccttatttattttctctattcacttttgtttgtttctctgtttcctcctttcctggcttgttttaggttagatgaacatgtttgtatttattttatctattgtattctttactatatctctctgtatagttggttttaagtggttgctccagggattatgatatacataactttttacagtctacttagaattattatgttaccacttccaagtgtaatatggaatcttgccactatagaagttcctttaatcctcactcatttatgttattcttgtctcatatattatatctatatatgtattgataacctaatcaggcaactctttagcatatttaaagaacccaagaggagaataatctatcatacttgcccagatattggccatttctgttgctctttctttattcatgctactttaagttaccctctggtataatttctcttttgcctgaagaactttctttagccattcttttagagcagatctgatgataataaattctcttgagttttcttcatctgagaatgtctttctttaatcttcattcctgaaggatattttcacagaatatagaattctgagttgacagttcttttctttcagcactcaaaaaatgttgtgctacttccttctgacctttgtggtattcaataagaaattgtctgtaactcaaatcactgttccccaataagtaacgtcccatttttctccagctgcttcaatacttgtctttgcctttagttttcatcagtttgatatttatatttctaaatgaatattttgggggttaatcttctcatggctcagtgagtcttggatctgtatgtttatttatctgccagatttagggagttttcagctattgtttcttcaaataccttttctgcactgcactctttctcctctttttctgggatcctattggcacaagtatttggccttttagtattgtcccataggtcttgaggctctgtttatttatattaaaacaattttttctctgttgttcagattgattcatttctgttgacccatcttcaacttcactgactcatctgtcatttcacgtctgctattgagaccatctagagaggtgtttttattttatttgtcacatttttcagttctaaaattttcatttggttcttctttatattttctatttatttgttgagactttctatcttttcatttatttcaagactctttgccctgattcttgaggcatttttataacaattgtcttaaaatctttgcctaataactccaccatctgtgttttcttggtgttagcaactgttgattgtcttttctcgtgagtgttgacattttcctggttcttcatagtccaagtcattttggttgttatcctggacattttgaatactatattatgactcagagtcttatttaaattctatagggaatgttgatgtttatgttttaatacaaccaacccagctgggttcaggtaagtttcaaccagcctcctgtgggttgtggttctaacagccattcagttttcaaagcctctgcagtgctatttagattcgtcctgtgtgtgcaccacccactggcaagtctgggacctgtgagttagtctgttcttttctttagttcatttctcaaagtcttcaatacactgcttaggactggacctattagtgttcataaataactttataaggtatctttccctagctcctccctttccaaattaccctagtacttcctagttttctgtgactctccttttcagtcctttaaccagagagctgagattttagttaccctaatctgccacttatttaccatgactatgtctgcatctggggccagttggaaccacaggtcctctcatcataagggaaagttttcctcccacagagatttacatgattgcaggtccctactactactgctattgctgcttccatcctactgtcacaggattacctgggctaggtataagcaaagggagaaaacaggagaaaagacaatggagggattttcccccactttctatgagtatcaggagtcccctttcccattcctcaggcttctcctggtctgcaccctgtgcccatttctggatttcaggctatcttaagtcaagcctagggcataccagagaaaaaaataaaacaggaaactcaccacaagtccagaagtacttcaaattctgatcttctttaatctgcctgctattatttaattttcagagtcctcaagtagcagcatcaggcattctatccagatttttttcactacattctgtgggagagggagggtaaaatgtgcttgctcgatcttatctggaactagaacctgccccttaactgtttagccctttggcccaaatgagggcacaaacccttcctatgtcttgtcaggtgggacaaaacagtccttttcagaggaaagtatgcattctaacatttgataatccagtaagttagacagcatttggatgttaagctgggatgaatcaagggacataatgaggatggaaagcaggtaatagagaaaggccctggcagaggatcagttataaatccctactgccatataccatgtgccatgccctgttgtgagcactttacatatataatgttgtttttccctcacaacatctctgagggaggtaatattgcccttataaggagacttaggctcagaatggttaaccaacttcaaggtcacacagtaagtgaataacagtaagtgaaagccaggatctcccccaggcaatctggggccaaagtcaggagcataactactccctaaaagagccctcagttctaatctagctcagtatgcagccccatgggctgggctcacagaagagtccagagctagttataaaaagccttgttacccaaagacaagagggtactccaggtcaagcctatagggcttcatctaccaagttttcagctgctttgaagtaggaaacagcaaaggtataggcctgaaaatgatgccccaggctatagggtacctcttatcaactgttccctcatcaataacaaatgaaagtaagcatcactgagcactcatggccttgcccttcaggtcggggttgtggagcaaattttaggcttgctcatggatgtaggccaccaggagctcaggtagtgacctcaggatcagaggcagggaccctatcttagtccatctgcactgctataacaaaataccataaacaaggtagcttataaaaaacataaatttatttctcacagttccagtggctggcaccaagatcaaggcgccagcagattcagtgtctggggacagcctgtttcccggttcacagacagtgtcttctcactgcatcctctcaaagtggaggggagaaggcagctctctggggcctctcttataaggacactgtcttagtctcctttagtgtggctacaacagaatgccacagaatttataaagaaacattcatttctcacagttctggaggctgggaagttcaagagcatggtgccagcatctggcaaggtcctttgtgcttcatcatcacaaggtagaaggcagaaaggtaactgagtacgagagacagagagagaaaggaggccaatctcccatgataacagcattaatccattcatgaggatggagccctcattgcctaatcacctcttaatggtcctgcctatcaacactgttgcactgggaattaagtttctaacacatgaactttggaggacacatttaaaccatagcagctcctagtcccattagtcccattcacaagagcagagcccatatgaattaatcacctccacaaaaggccacaccttcaaataccatcaccttggggtttaggtcaatacataaatttggggggtacaaacattcagaccacagcagaatctaagctccaaagccctcccaccccaagcctgccaggcctccagggtcctcagctatctaccaccaccctcttcctccctctgaattatctcagcctcactctccctctctctggtccagcctctgccctcctgctagatcttttcatttatcttttgcatctcctcccttattcctcaatgccttttcctcatcttttctctcttcttccttctttcccaacacttcctgttccttcactctcctcctctcaccctactccttccctctccttcatgtcagtttcatttaatccttccttcaacagtcaccaagtgccatgtgcccagggctgggataagtatgaacaatttcaaaagatgagcatactgccttgccccggaggagctcacagtcctaataacagataagtaagaatgtcatttgacaagttcttaaaacatctaggcccctgggctgatttgaagaagctcctgcctccttccctcttcgctaccctgagtctaagcacacttatttcttagagacagcttctcagcctcttccagggacaagagcaccattaactcttgtgaaacctttgtgcaagctagaaaaatatatccctttctttgggaaaacagggccgtataccaggatgcatgctttgcagtgaagtataggttagatttcagctcctgtttcccctcttggctagaaggctttgtgcagtgtacaacatgcccaacagtttatgccagccctgctctggggtccatgccttagccagtgaatggctctgcttctctggacctccttgggcctttgagcagagctagaaaagtctttgcaaactgagtggggtacttctaaccagatgagggaagctaacacagtgttcaacaggagctgcctgacttctctgtcatcttggctagctgcagttctcctcttgcttctttggctgaacccctccttctctgcttctccttcatcatccaaggctgaggaagagaatgcatctcttgcctgtcatctctctgagcagttggaatcgacaggtcctcaggcagagggactggcccctcctgacagcaaactagttctagataaatgagtattggttttgctctgttagcttttcatttgtagctatcctttgatttttcttcccccttgcaaaattggttaagcaatgatattatgtgtctggttctgtggttgcattgattggtcagctcctggagtctgggtatttgctgggttttctgttgtatttaggtttccactccacctccacctcaactacctcctctatttttgtggaaaaggtagggaggaagggaactaacacatatggagcagctattaatgccaggcactatgtgggtgacttatgccaattgcttcattctatcttccaaaaacgaaacaagccaatgtggtgggcattatttgtcctattttgcagatgaagaaaatggtgagagattcggaaacccgttcaaggttgcatggccagaaaacagcagagccaggtgtgggtcccctgcttccccaccagactcatgttttacgactggccagtttaccaagtggccctcagtaagtggttctgtctagactccaggctgccactctgtgaagtggagaggcactcagaccagcaatgtaatggggggttattcccccagatgaggaaaccctgagatcattagagaaaggtcaaaagcaaaagggcatggtgacagtgaagggggaaaggggacatggtgagtagaggagctggcagaggtggagagggcccagtggggagggacaaaggagcacgttggcatgcaaatgtgcttgctgagtgggcatgttcccagcatcagtcagtcatggtcttcacagcagcaaatgggtggtccaatttgttttctctccagtcctacccctttcctcttggtggagtcatccagttgctggacattacaggagcccacctttaggtcgacttcaagaactcacagctagaacagtctctgtggactggaggagccctttgtgattacatggggcttagaactcagcatgcctaccaccctttgttgggatggttctctgtggattggtcaagcctttagctacatctgattgctagcaggagtagaagagagagacggggaggggggcctctgcgggaagcagcaacaagttgaaatgggaaggtcaccgaagtttaagcccctcccattcacacacctcttagctgtgtgaccttggataagtcaccacttttctgagccttaaaaataacaaaaagctgctatttgagtgcttaccatcttcctggcactaatctaagcactttccccatattactcatttaatcctcaagacagccctaggaagagtattatccttatttgacatccatcaaattgaggtttgttgtaatgatcaaagaggtaaaaacaagaaagtagtttgtaaagtgtgtgtgtgtgtgtgcatgtgtgtgagatattattgcagaaatcagcaccgtcatagcccatcagggaggagcagctttctggcccctggcatcccctcaaaaagattctgacaacctcaggagtcaccaaggaggcttcctggccctggccctgaccctggcctgaccaccttcactctacccaccatccattcactcaagccacaaatatttgaaggcagatcagggaccaggcattgttctgggttctgggaccaaagaacagacagcatttctgcatctgtggagcttacatttgaggtagagaatcacactacaatttaataaatgcacggtctgtagcaaaatctcatgcagagaagtgctcagagaaaaataaagcagagttgggggtttgacagggatggtgagggaggccctcttgagaagatgacacgtacccagagacccgaatgaagggatgcaggaccagcaggacaaggctcagaggtgggtcccagcccagctaggcagagcaaccacaggacacatggctgagaagaatgagtgagtggaaaactaagtcagagcgtcagcagggccgctgcccacgccttttgggctacatgaggatgtagggtttattttaagcataagtatttgccttggaagattctgggtgacattatctttttttttttttttttttaacagagtcttgctctgttgcccaagctggagtgcagtggcacaatttccgctcactgcaacctccgcctcccaggttcaagtgattctcctgcctcagcctcccaagtagctgggattacaggcacccgccaccatgcctggctaatttttgtatctttagtggagacacggttttgtcatgttggccaggctggtcttgaatgcctgaccttatgatctacctgcctcagcctcccaaagtgctgggataacaggcataagccaccgcacccagccttattatctgatgatagggatgcaaaggtgaccatatgcccgacaggtgatctttctaagacactcatttcagcatctccactcctcacccctggcccttctctaaaaccccttcgaggttccttattgtgctaatgtctggtatggccctgcccccatgtcctctcggtcaccccttcccaagcaccagccacgcctccaggctcactgacccccgacccgctctctcctctaagccagctcgttctgcctggatacccctgcccatctaagccagacacccccacacccacatccctatccttgcagcctttttctttgggaactctttccgggccacctggcccatagcagtggagggccctgcactttgctctcagagccccacaccgacagccatcagactgcatagcacatggaatagcaattatctgctctcccgtgagtctccaccagaccctgcaagctcctacggcctaggctggaaattacccatcagtgtgtcccaccccccagtgctgagcctgacaggccataggaggcgcttagcaaacactgactgcattaattactattaattaataatagaggatggacccaaccacagctgcccactctgtcctactcctactccatgaggcctcctggctttcagggtgggagtggagacctgaggagataatcccctttgcctgccccagggagaggcacagcaggcagggccaggccaaccctgaggggccaggagccaactgccaggctgacatgcagaggcagccagccggcagggctcataaacggcccagttacatttatagctgtgttcttattaagcaccaggagaggagagatgaatcataccccctcctcccacccacagcctggggaggtggaggccaccagccggcctggccttaaatctcaggaaactttaaagtcacaaatgctcagggccagccctgcatcaccagggacagcagagaggaatgcaggctgctccggcattcatgtcccatggggtccaggccaagggcaaggcgtggaggaaggcgggggctccctgagaggtcctgggaacaggatcctcaattcagacgtgcactcaacattgtgtgactttgagacagtcaaatgacccctctggaactttgggcagcatgctttaccttaattaacagaatccaggtgtttctgggggcacgcccctcaatcctcccatgttacagaaaggcaaagcagaacctggaggcgaccctggccaccagaaccccaataactgtgccctgaaaggtcagtggtgcagcaggctggcagactgtacatggccttgaaagggaggtcagggatggcatttatggccacgtcatcagggtgttctcacccaaccctgactcaggagccatgatgcctgtcaccctcctatagcagggtgtgctgggtgcttgaaaaatgtctgcccccaccaccatgctcacttccctgaatagcagaaaggtgaggaatgctgtacccattttacagagggagtaactagaattcgaactgttgccaagactaaaacgtggatggggccgccttcacacctggggcctctttaactttctctctcttttttcttgtatgtgtaattgatttcagtgagatttattaggatttttaaaccctttttattgtgaaatataacacaaataccaaaaattgaataacccataaatgtagagcttaataagttatacaaagtgaacacccaggaaaccacctcccaggtcccaggaaacaggactttgccagtgtgccagagccacccatgcagcctgtcccgaggccagttcctccctccctgctcagggaaccacatcccagccttcatgggaggctcctacggtaagcccaggctcctggaattcaggagaattgagagcactgaataggaaggcgagagtcacggcttccaggtccacctcctctcggggcctcagtttcctcttctgcaaagtgaagaattggacctctccagcccagtctagaatcctaaaccagcaagaagacaatttgtctgggatgatgggtactgatcagagggtgcctggatacctgttcatagaataaccagcaagaagacaattcggctggggtgatgggtggggatcagagggtgcctggataccccttcatagaataaccggcaagaagacaattcggctggggtgatgggtggggatcagagggtgcctggacaccccttcatagaatgcgcttccttcctcctcatccctgggaggaggtggtgttctctcaccacacccagaggctgtgactaggaggagcctctttctgcctgccacggagatggagttttggggttttctgcttggagatctgtggggagcctgggagctactcagttctttgggcttatcccccacccccaccagggagcctagtgtctagttttgagtaattccccagaagccaagccgagttcatccttcctgcttcccatcaagacctctgatgtgactttgggacccctgcccgcctgcacctctcctgggagggctgagccagctgcacagggctctgcagcctgggtgctgggaactatatgcctgtggggaggaagaggagaaagaagaaggaggaagggagagggagggcaggttggaccagcattccctgagcccctactgtgtgccaagcaccgcagaggcacttggcattcatgatctggtttcatcagcctcctcatgtggaagaaatactaatatcttcgtcttccaaaggaggacactgaggctgagtttaagcatcttgcccaaagtggcacctctaggaaaaggcagaggcaggcttagaaacaagcccctctgactccagagcttttcattttcactccacacccagccctggcacagaatcaagagaggaagtcaagtgagtcctgaggcctcactccctccttccgtggctgtgagcgccatggtgctgatgaatgaaggggctggataaattagcacaggaagtcagtgatgatgaaggtgaaatgaattggaaggaagaatgagagttggggtggggtgaggcaggcgagagttcagagaacagagcagtttccagctgggaggactagggaaatagtggaaccaaactccaagacagagaaaagcaggttaggccaggcatggtggctcacgccacctagcactttgagaggccaaggtgggaggattgcttgagcccagagtgcaatatggtgagacctcgtctctacaaataatacaaaaattagccaggtgtggtaatgcacacctgtggtcccagttacttgggaggctgagatgagaggatcacttctgcctgggagatcaaggttgcagtgggccatgtttgtgccactgtattccagcctgggtgacagaccaacaccctgtatcataaaaagaaaagaaaagagaaggttttgggtggcgggtgtgcagcagggggtgccaggacttgatttgaagactttcaacatcttattcacttctttatcccttgctaagaacctgcctgagaggccctattcacgtcggatgggcagatgggtaggtggaaggttggttggaagagggagaggtcaagaagtcaacatatttatggccaagggactctaggtttttccttgcattccaggtggagagagaaacatacatttggagtaagtaccctacaagtaagtcacatcacccagagatgcttaactggggtcttgtggatctccattcctggatctcctcccccagtcctcctccttctcccacgcgtgccctcccaccctcaacccctatttcccgccccccccttcctcattgccctccagaaaccagaggggaacatgattctcagagaccaggaaccatgggtgtgagctccaaactcctttgctcataccagcaacttcagcctggtgaacctggggctcagagagtgctggcatcctggttgaagacccccagcaagacctgctgccaaagtgagaccagactacctgaccacttagcttgtagggctcgaggctgtgctggaggaaaggagaccgcaggggcttgcattttctgtctctggaaaacactgaaacaagccagcctcccagccacactgagctcctgctgcccagcctcagtgaaggccatggcttctcagcagcaaactatgattgctcgtgttgcctttcctgctgaatgattttagtttaataattttgcatgatctcggcacagcatgaagaaagagtagagccgaagacacagggcttatagtgagggaaaaggggtagaaccggaatctaaagagctcccttcaatctgaccttggccagtgactggaatttccaaccaactgttgctggttaccacaaatgacagcagcctctccctctgtgcatggctctcagtgggtccccaaaaggaaaagggctcaggggtggctcacagcctcacgtggtcatgggtaggtcccacgttgatcatcgtaccaggcaggcattgcactagaattatctcactgaatctccaccacctccccacacctaccgccccccaacacctaccgccccccccacccaacacacacatacccaggaaacagtcattgtcatccccatgtgcaatgaggaaatgcatggcacagacttgcctgagacccccacccagtaagggctcatagagccaaggtcaagctcagattgacagacctcaaacaggattgccttacacagttacacttgggtgtaagtgaaggccttacacccaaactgggagtggagaactttttccaaactggaaggaggctctaggagaggagcagagtccaagggagaaattcaaggtctttccctggaagaggaagagtcagaaaagtagggcagttagaagatttgggaaaaaagctgaatcacaatttagagctgccaggactctcacagggcttgaaatcatccccttcactttgcagatgaatttcaccataaccccagagaagtcaagcaccttggccaaggtcacacagcagcagatctctaaccacagccaaatgctcccaaatcccatgaccttacatgggattgggcctcccccacccacaaagccagcccagctctagctcccacaaggttaggtcaggttgggccagaggatggatggcaggtgcccaggccaggtccaggcagggagggtggtttctcctgctgtctcaccccggctcattactattcctggcatcatccccctcacaccccttcccgtggaaacccagtgatgccaagagctggaatttggacgttttccaagcatttgggctgttaattaaaactaataaatctgccacttggagttgagttgaagaggagaaagggagaggtaggggagggagacagggactggggtgtaggatccccacacacacccctacaagggtctcttcctttcaatcctgcctcctgaactattttctctgttggccacttattcattccacacttgattctcccagctgtcagaccctaacctctgcctgagtaagctctggtttcttctaaagagacacaaaagacgtgcttccaagtcaggggcgggcctgtcattccctgccactccatgggactgggcaaaaagcacgagacccaggtggggcagacctgggttcaaatcccagagttgccctttctagccacgtgacctctggggagccacttcacctctccaggtgtccccttcctcaccttgaaaatgcagactgttaattcctacttgcaaagatgtaggttcttgcaaagatgacatgagaaagtatgcaaaatagcctgttgctgaccattcagtgatctcgctctgtgatctgttctgatctccacttcctttttctcatctcccctgactctcagaggttcccataaacgattgcatgttgtgaaatgatatgaatagcagtaatgtcaccttatatctgtaaagcaaatttcaaactctcccatagtttagaactctctctctaagctatggggtgccatgtctacatccatatagcccacgcacaaagccatgcactatccaggcaatgacagtggtgtattcatctttattttttcagtgcccaccacagtgctagacgcatagggatggatgaaagaagtgctttcatacctggaggggacatctgttccacttgtctgcccagtgctctgtctccttcatctagtaacaaacagctcccttctgcttagagaactgcttctcctctctcgtacagtgtgttccttttctctcctgctacacaggtggccatgtgaccatgttggtctaatcagagccttctctaggatttttcttcctgagactggtgaggaggcttctttcctgttcagacatgaggacagcgggtaggtggagctgcctgtgagcatgcctccagcctttctcatggcaaagatgaagtcatgcacaaagagacagagatgagagacaaaaagcaggtgcctagctccgctggcttcagccctcctatgatcaagtgatatgagcctatgaatttcctatttcttcattaaacataattgagcagggactctgccattcacagcctttgactcacacaatatctatcatctcatttcatcttctcaatgacatctcaagctgggccagcagagattgttattgccattttacagatgagaaagtcaagtctcaagaaactgaatttatttgccaaggctgcagagctgctaatgatgggattagaactgataacaagtactaatgtttattgagagtggcaggtgctatgtttaggggatacgcattctcccacaccatcctctcaataagatgatgaaagcaccaatatcaatatctgcctttatacagatggggcaactgaggttggagcagttaagtaaattacccaatgtcacagcgagttatggagtcagcctaggtctatctgcccagaattgaggccaccagccacccaccttcactgcccccacagctgcctttctgggagaggagtatctctgggcggtggaagactaagagcacagaaataatcaaataactgctgcatgcacagctttgtccatgggctcaaggatgcagaaatgaccaggccagggaccctaccccaaaggaactcccagtctagaagagggaacaaggcatgtccataaatagccatgctgtgaggctcaagtactttgggaacccagagaacagagagatggctccaactgggggagaggcaggagcaagtggcacttaaacatgacctttcatatgggcaggatttggacctgtggacacggtgtggccatggcagggtgaacatcacaagcagaggaaaatgcataagcaaacacctcaggtgttttggtaggaaatccaatgattttgttagcaggagaaaatgatcccatttttctgaagggtagtgtgcatgaatgggaaaagacaaacaaaagaccagagaaatcaattaaagacaacaagttgagtgccttggatgccaagattaaaagtttgggctttatttggcaagcaatggggagccattaaaggtttttgagcaggacaatgtcatagtcagactggaacaatagtctggcagccacacataagacagattaggaaagggcaagggcagttaggaggaggctatcaggaaaggcagtaaaggcagaagtaggccagaacaaggcatgggggagggaacagaaagatgaatccaatgacaccacagaggcagacccatcagagaacagtgtggtgtggtggaaagagcttatacttgggaatcaggatggacttgaacctggactgcctgcctctaagagctgatgtgcagggcacaggggaccatgaacaggacagcacattgtgaaccgcaagtgcactcgctgattcattgatgctgccccaggagctagaagtcagctgacacctggtaagtggtcagtgaatgccgagggcatgatgggaggatggatggacaagtgactgagtgaggagatgagtcagagaaggctctgtgaatgaaggaacaaatgaatgaatgagtaaaagcagcagggaagagagggagggaagagagagaggcacagcagcttccagagtgctcctggagaaggacttggcttcagaaacctttcttccatctcctccaaacccagtcccaaagctgacacagcctgggctgagccacagtttccacagctgcagggccttagcgcaaggagggatggaggaggagggacggaaggcttaaacacgatgagctgcttgcatggctctggggtccctcctccttctaagaaacagaattacttacttagaaggaaatcttacttaaaacctagtcagcactgctgtgatttaagccccactataccaggttcccctccagccctgctggttttgggcaaggatggaggccactcccagggctgtgacctcaatcaagccagggaccccttggagccagcgcttcctcagtgtggtccaggcccaggggaacagtgggtaggtgaagctgcctctgagcatgcctccatggtgtcagagcctgtgtggggcctgggagctcaggttggctgcccccaggaagccttcctattgggaccactccttccatttcagacaaatcactcacctgccagtcagtaatcagcccataaatattattggtactgacattgtatacacattctctcactcggtcttcacaaaagcaccatgaggtctcttcccatttcacagataaagaaacctagactcatgaactaacattcccaacttcacacagtgggtggagaatctcatccaacatgaggcacaaactgctgattggtcacctcccaatgcccttcccacatttgttcaacataggacttggaggggagaacaaatgcaaattaacataacaataaatcccccgccatgaatggaaaatgccgtccaggcagcagggcaagcagagaggtccccaaaacaatcatcacgatgacagttaacatcattgaggctttctctttgccaggccctcctgtgcacttgaagcaaatcaactcatctaactccttggtaacaacactcagtatgtccccttttaatggtaggtctccaggaaggtaagtgactggcccagggtcacatggccaggatagggcagagcctggactcaaatccaagcagttccactccagagctagtggcctaaaaatccccaatcccaaaattactctgggaggacatcgtatcactgcccctaaattttctggtttgttgaatggcgatagtgacagtgcttgccacacggtgtctttagggaaagctcatcaggaatatggctgtggggtacccccataaactgccatgtactgtagagtggatcttaccgctgtccctggggcttaggtggcactttgggaggcatttttatttttaattcaaaagacaggagaggagttgatgcaggtggatgggaagccaagttgggtgtatgagacaagagaggcagagactcgggaggcagccggacaggaggtgctgtcagaactcagtagcctgtgctgataaagtggtgagtggaggcaaacagaagttgcttcagagcagactaagcctggatttcaggaaacctgctgtgttaccttgcacaagtcactacccctctctggtcccggttttctcctttggaagtaaagtgaggcaaagaggtagggacagcgaagagtggtgtgaagattctctctaaggtcatgttccatgtcactgcactatttcactttacctgagagctagccctcagcacagtggaatacaggaaacagatttggggtgggggtatgatacaacagccagccctccacacgttttgcttctggagacccagaatccaagaaaaggaaaatgctctgtttccaccccactcagcttgtactcaccccaccaactccccaaggtaccaagaggatgagcataggagagataccagttaaagtcatggatgtactcaccctcagtttcctcacctgaaaatgaaaatgactatggggagggggtggtttggttctcttccagctccaccagcctagggttctagcattcaaatgaagctgttttccactaggttatctctttctttggggatagatgttgggagagggtgggagcagtgctaactcaattcttccttgggtagagcatcctctagagggggacaagactggagatgggtgtgctgtggctgcagagtacaggataaaggaagggctttaatgtcttcatgcaaattgtgcatcaacttgagatagaaatgccaccttctccaggaagccctcatgattgttcccagtactgactgtctgaatgcatgttctccccttcctcccatctcagccctctcctgtctgggttcccccctcacaagtgtgtgtgcacgtgcacacacacatatacacacaggcacctccaccctgcaagcccatgtcctccactgactgaccacacgttcccaccaggccggcctctgaccctggtccaaggcctgcgggagaatctgcagagtcagggctctgtcctcttttccaatttccttctgctttgattttgcaggttctttgattgcccatggactttcaggctcaggcaaagggcagctctttgcaaggaaaaaaaataatggaagaaaaccctgggaaataaatgcagactctgcttccttctccagcccaacattctgaccaggctcaaagaaagatcctgtgaccacggggtccctcagaggccgcttctgatgtgcaaggctgccagtgtgttaaaacaatgaagattttgccaaaatcagcttacaaaaaattgtgctatatattacatcttgaatattaacaatttaatgctttaacaaaaaaattacaatgtaatataattgctatgttaacaagataattacaggtttatttttaattaattcataatatgctacagatggtgtggtctgttaataggaccaagtttaacattataggatgaactgtttcttttacccaactgggcagcactgagacaggagaaattacctcatttgaagataatgtcaagagttgaacctgagactgtggcacccagactgaaagcttctcctgtcccttccggctccccaactcccttcccccgtgacaaatctctgctcctgaacatgcccactctcccagagatacctgaaaccacagagccggaaggaaatttcagatgaacggttcagactcctccactgtccagatggggagattaaggccccattcagcagtctggtgtcataagagcttatttccaaacacacctcttacacttattacgtacgtggccctaagaaagtcaggtcacccctctgagcctcagtttgctcagttatgaaataggcacaataaagcttgcctctggagctggagtgaagtattaaacaatacatactggtgacatgtatttatgtcaccctcatctgactcctgtcccatcaggtgagggtgatgtggatgggactggcagcaggaaaggctcaaacgcaggccaggactctgtgtcccctcgtctcacctgcccctcctccactgagcagtaagcagggttggagcacagagcagcccctaattccaaatccaggggagaagctgtgtctcgtggcacacatcatgccccctggatgacctacgccttcaccctccaccatgaaataaggggagagcttgaggtcagagaggaactggccatctgagaagtggaaggctggagcccccaacccccagcaccatcgtatgcaactcaagccatctgcatctggcctgtctacgcgggagagaaagagagtcagtcgaactgagtccagccctggggattaagtgacataggaggtaggttgaggcctgggcagaaggtaaccccagcaggcctgactctggacccctggcacccagagacctgctcccaaacaatccctcccatttctcttccatcttaaaaccaaagagactgagccccaggattccaatagttgaagaggatcccaggcttttcagcccttaattgagaggtgagggagggaggtggggagcgagaccatggctgggttaggaacacaggagaacgtaggcagagcagcaacagtccaagccagacccccttcctcaccacctgcccactgaaacaacttctagcaaggtcaccaagaaccaacacttagtaaaagtcagttgtctctgctctctccttcccttgtttagtctcttgggaatgtccagcatggttgccactcccaccctcttgaaacgattgcttctcttgcttccttggtaacatgttcatctagttttcttcctccttcagggccacttctccaactcctttccaggacttctcctttgcctaaattttggagtgtcccagctcccttatcctctgaatgaaccctgtctctccaggggacctcactcattcatattgctttctatatcatctgtgtgctgatcacctctacatttatatctccagctctggccatgcctttggcctgcagactcatttatccaactgcccattcaatatcggaggcatctgaaactcattaagtccaaaaagagcctttgatttcacctacaaagccactcctcccactccctacaagccttccgcatctcaggaagtagcacctccatccaccagtggcccacatatccagagtgatccttgcttcctttttacacactgtacagtgagccctattggctccacctcctaaacatatcccgagtctgagcatttatcagcaaccccatgctgtggtcctacactaccctctcacctgcaccaccacacctgttccctgctggccttccactgccagctgcttatacagctgctttatacagcagccagagcaccatgcccctgcttacactctccaacggcttctcatcacaaccagaataaaaccaaataccgtaatgtgctgtcacagctcagtttccctggaaagattggaaaatggtatgtaggaagttaattgggatgtgctctcaggattacacctgtgggaaaggaagaaagcagaattggtaggggaaatgttgagctacaatgcagaagcaacagagacctcagccaatcccacagaagctctagagcagggatgacctttcagagttgtcccagaataggaagtcaagccttacactcctgcatcaacctatcatagatatgggctgccttcacccaggaatagcgtgtgacctcaattggaccaggcagccctcttcagctgacagcaattcctagagagaactcagatgagtgctttcagctgctcgaggaggagggcaacccaccacagcatctactagacaagacaaacaagacttggcatgatctgactctctcatcaatgcatctcccaccaccacctgttttgttttgttttgttttttgtttttttaagatggagtcttgctcttgttgccccggctggagtgcgatggcatgattcggctcactgcaacctctgcctcccgggttcaagcaattatttttactcagcctcctgtgtagctgggattacaggctcccgccaccatgcccagctaatttttgtatttttagtagagacgggttttccccatgttagccaggctggtctcagactcctgacctcaggtgatccaccggccttggcctcccaaagtgccgggattatagccgtgagccaccaagcccggccctcccccacgttcactgtgctccagccacagtgaccttcatttggcctccaaaacaagctcaagaactctgctcttattgcttcttctgtgtctcatccttcttatgtgtaaaatggagaaaatcatacatctgcttcatagcgtagttaagaggattaaatgagtcaatacatgtaaagagcagtgcttggcatggaaggtgttatataatcagaagcaaatgatagtgatggtgatgatgataatgatggtgatgacagtgatgatgataacaatggttaagatgatgatggtgatggtaatgatggtgatgatgataatgatgatggtgaggatgatgttgataataatgatggtaatgatgatggtgatggtgatgatgatgatgatgttgttgatggtgatggtgatggagaatgaaactcccttctcttaaatcactgtatggctaccgcttctcaacattcaagcattttctcaaatgccacctcctcagagaatccctccctgacccaagccaggcagcacactcctaatcactgttcaccttccaaccccggtttatcttcttcatgacacttaacagcacctgatactatcttatttgtttgtttacatcagtggttctcaaccaagggtggcttttgctccccagggaacacttggcaatatctggagacacttttggttgtcacaactgggcagggggagtgctactacatctagtgagtagaggccaggatattgctaagcttccaaagggaagccctacaacaaaggtatctggcccaaaatgtcaacagtgttgatagtaagaaatcttggtttactttttatttttttttctcctccatgagaaggtctgtcttgttcaccctcatatccacaatattgacaccttgtagatccttactccatatatgctgactgtcagtgcttacaataacgtttcacatggggtaagtggtctaaaactgtttgctgagggaatatgtgccaagccctatgacttaatagctgcgtgagcttggtgagtcacttaactttcctgagcttctatttgcaatttgcttatttgtaaaatagcataaatattcattaatgaaaccgacagttaccaagatctcactgagttcctgtcctgtccactctttagaaccattttggggattgcaggaggtccatggattcatcctgagacttgctcaaatgtcacctcccctgtgaagcgctccctgatccttgccttcctcagctacccaccatcactaaggcaaataagtctctccttttccaggctccaaaagccccttgttcacacctatgtggtagtgaaccgtgctattggcttgaaatgcttgataagttctcagccctatcagactctgtcccttttataacaaatagtttgtaatggttcctttacaatcctgaaatgaaattcatatacagtataacctacctagacacatcactggaaaataaatcaacataatgccctaactgtaagataaaaaagtaaaataaagataatttataataaaatatgtatctcaatatgtaaatgctcaggtttgatggcactagaagacataatgaagtcgtcagaggtttgtgtctacacattagctcaccctgagggccagagcctcaaacactcgggaggttgtgtctgggactccactgccacaaagagctttgccattggaaatgtgattttccagaaatgatgaataactcttggtaatgtttccaacggaacaatcttccttcaatttacatggtagttgtactcccagaaaaatcagtgtatattaaattcatgacacaaatactttatgtttatatgtataacataggttccaggctcaaataattataaacaggttttttgtctacttgaatgtcgaccaagatatttgcaagtcgcgtgggatgtggagtgatgcttcactgagcaggatcatccctgcttcgacgagcgtttaacatccttggccactcccactaaatgccagtagcatcccctatagtgattgtgaacatcgaaaatgtccccctgcttatttacaaaactgtccctccacgatggcactgccctcatggagaatttctcttctagtttgtgtctttcacctgcctatgagctaccagaggacagatgaacttgtacatgacaggtactcaagaaattctgatcggctgtaacacatgtgatcataccccatgcatatcccctcagccagccctggaggttgcctgcagaaagacctgccaacggtgacagatgggtgtcctccagccccgggagtgtgccaatccatgtactgatcaggccaaaagcgccagggagctaacagcccacagacaaccctctgccaaggagggctggggttgggggataaattccccaacttcctcgcccctccatgggaccaaaataaggcacactgggaagtattccagagaatctgccatgagcctgagagccccagctgcccacagacccacagagataaccctcgtgaacaccccatacctggctctccttccttcctgtctcatttccccactccctcagagcatttcctgggatcacctcccagatatactccttgcactcagattcttgtgtcagtgtgtttcaggcactattgttacacaacaaaccaccccagaatcgcttgaaacagcaaggatttctgatttcccctgattcggctgttggctgggcggttcctctgaggtttcactgggtcccgcagagccggagggtcccctgagctggaagatcaaagctggcctcacccactgttcggcaggtggtgcaggctgttggccggggaaggctctgtcctcctcctcctcgaggcttctcaccctgcagtagctggacttgcatggcagcctcacaacagtgccccaagatggcaaacgagaaagcagcaagcctcttgagcccacgctccagatcacaaacaacatccctttctgttacattccataggtcaaggcaagacacaagatcagcccgggttcatggtaggtagagaaacagatcttgtctcgggattggagttgcagcaaaggcatgtgcatgcagggtgggaggaatttatgatcattaaaaaatctgccacttggggtctgctgtgggtaggggtaaccccaaattaagacatcagccaaatcaagcaatgacacgggcagactaatgtctggcggcatgacagaggggaagatgtggatgtgtgaatgcactttggaaacagaggcacagcccaagttgctggtgctgaccaggatgtgcagctcctggaaacacaggctgggaggaaggcaagaccatcttagcatctctagttccactgctgaacttgtgtttttccacaagactgcataattcaccaaggcacaattacttacggaagaacataaacagtgtgtgccatgggcccgtgggggtttgtaattcagacatgtctccagggataattaaaatctctcctcggaacaggaagtcttgaaatagtgctacagtggtgtgccctgctcctgctgaacccagggtggtggccagggactcctcaggacaggatgaggagctgagggtggggaaggagaaggtggtcaggacctgcaatcctgggagaactcagtggacgcccaactgcagcagcaggagggagttcaatgtcggggagaacttctcttatcaccagggctcatttttagaccatggtaagggctgtcccctttgcccgtggatggtaaggacagatggagggaggcctggtttagacagagccatggtacaggttagatgggcccatctagttgtgttctgtgtctgagtgaggctgataatcagggatgggattctttcacggataagggagaggaagggaagaggaagggaacattgagtcttaaagacctactccatgtcaggctctatgctaagcactttacaccccttctcattcaacctgtacccattttccagttctgaaagtgctaagcccaagaacataaagccactacgtggcagagcagggacccaggcctcttgactccaaagtccacaggagtgtctagaggaagccagcaaataaggtgaagtgttgcacagcagacagaagagaggacactctctagaaggggacaaatggctctgccttaaagtccttgaaagccagtaagaaaaagagagttgagccttatggtgtgtatctccaaaggccaggaccatgccaggaaatggatgtgatcagaagacagatttcggtttggtacaagaaacagctttttaacaggcagaatcatcccactctggaatgaatgagccatatggagaggtggtgagctccccatccctagacacatgtaagcacaggctcaatgccctccagcagtacttctgtagaaaggttagatctggtacctctgcagtctcttggaccctaagtttccagggatctctgggaggggctgagtgccttgggcggggtaccctgatgggcataggcaaagttgagccaggagagagttcgtgactaatggaagagctctggaccctgccttctcccttccctgccctcccagagcctccaggcttctcatttgctgctctcctggcaaagctactggctggtggaggggagggatcaggaggtgcccccaccccgcctgcatgctgaatggcaacaagttaacctgctgacccttaatcaaagtctccaagcgcagcagctggatggatgcaccatttctccagctccaattactcagcaggaagttcatctggtggcaagaagcagaaggagctgaagacgaagagagcgaagatggaacggtcctgggggagatcacagccatggcctcagcccagggctgggtcagcttccagcccggcccaggcccacagagctccagccacctggagaggcctgtgctgaggggagggaggggagaggctggggaccttgggacagtccaggctcttctggtgtcagggaactggatcatagaatcctgaaagatgctgctccccacacagagccttcccatttcaaaggctgccagcagcacacaggggacatctgaagactgtggggaggcctctgtcaaccctaggtaccccttctatcccccgttccacccaacctcaacaccctgtgttccctctgggaccaaccagccctaagaagcccagaaaaggcagcatggatagaacaatttccctgcaatcaacccccaggctctgtcccacctccagaattgaactgggattgttgccatatatggagatatccagaacagggtcctgccagccccccttcctctgtccccagacattcctccccattcaggggtacatggacatggaaagggggttccaggccctaaacctacatgttgagaggtatgagaggctcccctccgagaagcagacacagtccctgggagagtgcagtctgatgggggagacacagaccctatcccggcagatctgccagtatgatttctgagttcaagaactccagtctgagagaggaagacaacacacaaagatggacttgcaaatgcccaccagtgagaaggtcccctgaccttctgtcacactcatgcataagccacaggctgcagaaggaagcgctggggtcacccccgggggctccactgaggaggggttcagttctgaggtggcttcacttcctccaaactcagcctcagaaggcgcttcctggagcacaggggcgcaggtctgtaccactgtgggagccaaggaagagcagcttattaatttaatccttaagcaaatttacaaaattgtcagtggatttgcaggaagccgagggaagtggcttccacggaagctggcagctgctgtcctgccagggggatttgccttgctgcgtgggagcgggcagggatggggaggcttcatgcctcagaaccccttccccagcacctcctggcagggaccctgcttctccacatatctcctctgtcagtctcttccctaaaaacagaacctgaaaattggtctgggaggacctcagccacaacggccactgatagaaataattatagatgcggagtaagcacttccagcgtgccaatgctgaacatatatgaattcatcatcaggaatgacacaggtactgttattgtcactgtttacagatgggaaaactgaggcacagaaaggctaggttgcccaaggtcacacagctcataaatggcaggggcaggatccaagccagggcaaccattctcaacctctgtgcccttctacacccttagtctcttgcctctctcttttgcttttggcttctgtcaaaaggagacccatcttcccacacccatggggatgctaagccaactatttctcatgctgttcctaagggcagccccaagtgtcatcctgatcattccccagcctccaaatgcccgagccactccattcctggtaaatacctccatcttctacctgccctgccctctttcagccacttcttccgccccacgccccacgagaatcggtgcttcccttcaaaattggaacctcccgagagcacggacttgggtcccaagccttggcacagtccatctgggtccctgagtaaggcatggcttcttgaaggggtcccaggccttcaagtcctgcagcaattctcctgcctccttgataaggcctgtgcccaacagccttcgggtttgaggagaaggctgctacgagccagcgtggcccaggcccagctgactgaatctccaatctccacagagactgaggctggttaacctgttgggagagttcaatgatcacgtgccgataaggaattagaaaagccctgaccagctggtgaccctatccagccaccgtccctggtccggctccagcacccctgtccagcagatctctcattagcatcttaatgtgaggaacatatgcaatgaggcatctgagagaatccccagcatttaaattcattaacagtccctggaagtcttcagtgcggaggtggaattatcgctaaactgcttttaacttaccagctgtgcactgaacggcagaggagcctggctttagggtttgggaggggagttggaggggagttagttggaggggcactactgtctggggcccaaagcccaagcccagggatgctgaggctcctggctggagggctgttttccagattatgttcaacaccctaatgatgagtgaaaaattcaatcaatcagctggcttgtccacttagaaacaaacagccgcctcaactgatattgatgtggctgtgcgtttcaggtcaagtttcgtgaccctgcctctctctgctcagtgtatgatggatgatagaggaaatgtctttcctctcccgggagtggccttcctctgactggccagaccctccctatgcttcatagccccatcaggcggcatttcctgacactgtcctccttttcccacctggtttctgtccagcattttcacctcccatcccagcacacagcccacagtgccatgaccttactaagatctgtctcttccatgtgcccaagaatcccggagagcagcattgggcctgtgtgtatcccagagtccagtcagcccctggcacaaaagatacgctcaacagagattcactgaattaattaattgattgattaaatgctcctctctgcctgcagtgtcaatcacagtgcctggctcattgtagattcttaataaatatttgctgaataaatgttgaatgacagacagataagtggtagatgcaaggatggtctggggataaggaggttaagatttatgaattcaatgctttattcaacaaatattgaataactaatcagaatgatggttaatatttatattcggcttactatctgcaaagcacatgttaacccatttaatacttataacaactctgtaagaggattctaacactgtcctcattttacagatgggaaaactgaggcatctaagcaacttacccaaggctctacagttaatgcttcatggagcagggatttgaatctagagtctagctcaagggcagtgccctccaatggaagtaaagtgtgagtgagccacatgtgtaattctaaattttctagcaaccccattctaaaaagtaaaaataaataagaataatttcaataagatattttgtttaaccaatatattcaaaatattttcatttcaacatataatcaacatttttaaaagtattaatgagatttttcactttcttgtttccacactaagctttcaaagtctagtgtatgtcaggtgtggtggtggctcgtgcctgtaatcccagcgctttgagaggctgagtcaggaggatcacttgagcctaggagttcgagatcagcctaggcaacatggagaaacctggtctctacaaaaaatacaaaaattaggccagcatggtgccaggcacctgtggtcccagctacttcggaggctggtgtgggaggattgcttgagcccaggaggtcaaggctgccgtgagctgtgattgggccactgcacttcagtctgggcaacagagcaagaccctgtctcagatttttaaaatccagtgaatatttcacactcacagcatatctgctcaatgcctgcatgtggcacatggctgctggactgaaggatgctgagatgaagctgaattcctaaccactgttccctgctacttcccacctacctgtgtctggatctgtgctagacactgaggacacaaacaggatccagccacggtcccttcaaggaagctacagtttgttggggtagacacacgtggcatagcaacacattatagtaaatgctggtgacctaagatgtgatgagattatgataagaacgtagtgttgtatcactgtacagaaggagaatcttgagggtaggggtcttcaggaagccagagaaagcttccagaaatcagaggcctgcctgaggtttgaatagaagtaagccaggtaagaggtagggaatagcacgtgctaaggtccagcagtggggaggtggacagcaaatccctgagaatgcaggcagctcatttggaagggctggagtcaggagtcaggaggggcagggtcttgaaagcccaggctgcagagtggaacgaacacataagcctgcattaaaagggtctggacttgacctagaggaacatagggagacatagggaagaaggattttaaaggagaaagtgatagactcagatgtgcatctgagaagcaaggctagaggggctaatactggtgggattggtggccttagcagggacagaggaggggaggaaatcaagtcaacaagacttagtagccatgcatgctggagactgagcagaagatctgacccctgggtttctggtggggctaatggctggacagtggggccactggctggacagtggggccattttttgaggagaaggaactcagagggatggcaataggttgagggaagaggaggctaagtttagattcctgtgtaatgagttttgtggaagcagggaaatgagaggcctggatggatgcgccttaggatagcatggaaggctggcagggctggaggtacagatcagcacttcagtggatgaatggtcacgtggatgggtggcagaactcctggaccctgccatttttagaagacacacaggatgtgggcacagttctcctgttgttacatgtggttaggtggaaggaaggaagtgccctagggacttagggccaaggagatcatattaataagggatcacaaattgtctatgttcactcaattaatctgtgttaacagaattagggagtagacaattgaggcccagagaggttaagtgatttgtcctaaagcacacagccaggtagtggtcaagctgaggcaagaatcgaagtcctctgactctaactccagtgtccattcatccatccatccatccatccatccatccatccatccatccattcagcagctgcttattgagcacttactacctgcaatgcactaggtgctggggatgcatagtcaagtaatgatgttctgtgtccaggattaaaggaaaaggtagggcctggcagtagggaggggtaagtgtgtgaacaagacctgatggcaggagctactgcacaaggcactgaggagggggcttgagtgagccgtgaatccagtctgtggggcaggcagcagtgagcttactgtcctgcactggcctcatggacctagatgcctcatctttccacaccatgcacaactccatctggcctcttatcccagcacacagcccacagtgctgtcaccttgctaagatctgtctcctccatgtgcccaagaatcccacaaggcagcattgggcctgtgtgtatcccagagaccagcacagactctctgtatctgtgatgggagataactctgggaagatgggtctagaccagataatagatggtcttgaatgttcaagtaaggagtttggtcttgacttggtagggactagggagccgccgaaagttcttgagcagggtagtgaggtgcccagatttgcctttctgcaatctcctgaatcaggctccattgccttttctctgatctcccaaactgttctcagctcagtgcctgtacctaagccagcagaggacccaggagggcatgaagaagccccattgaagtaaccaggccctctcatgccctgttctgcacagcacctctctctgtggcttgccctgctgtaggatgaatgcgggcagaaacaaggtccagcacttggaagcaggggagctggatttgagaactcacactgtggcttcacctccgtgtcctcatctgtgcagcaaggaggctagactggaactgcccctccccatcccagatgggccttggagtcacctcacagcttgtcagtcacacagatgcctgagcccaggcctggggaactgctccttccagaaaaagagactggtcgggcttgggaagcaggaccttgtgtgacctcagaggacaccaggatcagaagaggagggtgggaggctgtccaacccaaaccttaaaatccatgggctttctcaccctcccaccttgtcattggaatccctgtttcatgcataagcaagttcaggggtgcaccggtccacatccagggcaagccatcaccctggcaagcccattttcaaaggaccatgttgccttccaggttttccagacacagagaaataaaacacaagatgtctggctaaattagaatttcagataaacagctaataatttttttagtagaagaatgtgtcattttacatgttgggtccaacaattagatgtaaggatctcctaagcctctgggcttggggccaaaagagaggccgtcccctggaattctcgcttactgcctgggtgaggtgagcagggagaggctgtttcagattgaaacatgtgtagatggtttttgaacaagggtctgggtgtcagcttcaagcagcctgcagcactggcttctagtaagccagtcactgactcagtcacctcaaatccctttatcaccccaactgccagcccaggctccaacagcccacaagccacagagcagggctattcagagaggaagggcctggatgggaagacaagctcattaggacaaggctttcgtgttaccaactggaggacctgcctcagctagacccaggcccagagccctggacacaggaggaggagcccctcagggacccctgcagcagctggttcccacccccagaatgataggccatagagcaaggcccagacccagtccaggtcaggactgagaaggagttcaagatcagtcatcagccgtaggcgactgagtcattccctctcatcccacatgccatccctaaatacagacatgcacacacgcatacattcccagcactgtgcagcacatccggccccctgctctcccaagctaacaggtgcctcactgcttggagattgaaagctggtaagcagtgaggctgccagcccctcccacatcccccacagccatcaccttcgagccacacggctgctgccacagccaccagctaattagctgcggggtaacgaggggcccacgctcctgaaggcaggcactgcgttctgggacattagcttcctattaggagccactttccactgcaaacacaaacagccccggaggaggactggcagggtagaggctggcctggggtggggaagaagcagcatgcttcaggaagccttttattaactctctaatccattccagatgctgcagggtgcctggcctgggagccctggaaaggggtaaaggacgtagggaaaagatatgagattcaagagaaaatcttagattagataaatgtgagtgcaagagaaacatctgggttgtccagttggggaaaatgaggcctaacgtccagatgtggtggggatgggacagcttctgctgatttagcttcagctcagactgggagccctgatgatcccttatctggttaatgggtttatcctgggaggcgggtggggctggcaggagccgggcagggcagaaggtacccccctagctggaatggctgtctcatctcaggcagagaccagagaggctggaaggcaggctcccctaaagttgaacaatatttccttctcactcgagagactgaaggctacaagagggagtgcctagcagctgctgacaacccagcccccagggcatgcccagatgtggatgcaccactggaggtgaatgtcttcataagcacagacacagcagcacgcatggctctgcacactcatgtcatgcacagacacatgcctaccactcaggagaccatcagcctgactctcgcacacacacgcacacacacactaacagcagtaggggtggggggacctgaagcagcagcactgcccccggcagcccccagaaccaccacctggtctctgcccctgaccaagccaggatgaggcccagccaggaatttttccagcctggggttattaccactcccttttataacaaacattttgtaatgaaatttatacagtatataacctacctccatacattatgtacctgcatacataattttgcccagttataatatcaaggagaaataaacaggggtgaaaagttatgataaaacactatgtatttctgtatgtgaatgcttgagcaccaccacccaagaagacacaggaaagagtgagaagcttgcacctaaatgttggggcacctgaacacccacagatgatgatcgatcaggtggttcttttagggactgaggcaccatgagcaggattgccatccatgtagtggttttccaactggtaagcaattcttagtaaaatgcttatcaaaaccaagtccagtcttccctcaatttactggtggttgcattcctggaaaattttatatatattaaatcatgccaaaaaatagtgaaacctccaggcgcggtggctcatgcctgtaatcccagcattttgggaggccgaggcaggcggatcatgaggtcaggagattgagaccatcctggctaacatagtgaaaccctgtatctactaaaaatacaaaaaaattagctgggcgtggtggcgggcgcctgtattcccagctactcgggaggctgaggaaggagaatggcatgaacccaggaggcggaggttgcagtgagccaagattgtgccactgcactccagcctgggcgacagagcaagactccgtctcaaaaacaaaaaaaaacaaaaaaaaaaacaaaaaacaacaacaacaaaaaatagtgaaacctaaatagcacagcctcagcttagcatctatacagcctgaggttctcacctcggacaaacattcactggtgtttcacatatgtgacacctggctggacaggtaacattttttgtcccgcccactaaaagccagggacacccccaaatcatgatgatggcccaaaatgccctctggggatggtacgaccctcactgagatcagatctaaagcctcagaccctctctgagtctcatgtccagggtcctcatacctccctcagcaggcagagaccaaggacacgggggataaaggatggaaactggtttgcaagcagaagagcccattacccaggtgcgatgaggtcattactgctgagaacgatgctggaggctatggctcaagaattgagggggtgtaaaggtccaagcacccaagccaggtacttggcacacgttatctgtgaggcgggccttgacatactctttgccaggtagggaatgcaggggaatgaggatctggcaggttaagtaacttgagtccaagtttatctggatccaatccccttcatctttctaagaccgcacttgccctcaggaaaggttccagcgaggagagggtatttgcaacaagataaaggacaaagacctttccagtaggtagagatggaaggagaacagcatcccagctgaggaaatagtgtgaacaaaggcatggaaattgtgttcaagtagcatgacctctagcttttctgggagcatagactccgtgtagctgtgatgggagataaccctgggaagatgggtgtagaccagataatagatggatgaccttgaatgttcatgtaaggagtttggtcttgacttggtagggactaggaagccactggaagtccttgaggagggtagtgaggtgtccagatctgcctttctgcagtttcctgaatcaggctccactgccttttctctaatctcccaatcagctcaccacctgcacctaagccaggcctctttctggggctggtgctgtcgaggaatttctcccagcctccccaagtagttttcaagccataattaattgcacagtaacgaggatctaattgccttccccctgccagcaccccagagatgacgggctgtacctggaagaaggtgtgttcagaaaaaaacaagttaattaacactgtgaacaaagaggctgttaattgcattgcttctaggacttgggaagacatttttcaggaatgggagtcaactgccttgggctcattagggaaaaccacggttctctgttgaagaggtctgtctcccctcctcccccacaaatgaactgcaataacagccaaactgactgcagaatgaaggcctccacttttttctgggagagccaaggacccaggaatcttcttgtcctcatgttatgggtggataaagtgagaccaaaaaggacacaaagatctggtggtttggcagcttggactcccttccacgttgcccacgtctactgtcaatctgacaaggaaagtggaaaggacagggctggactagggcggattcttccccaaagttctggccacttatggaggaggaagtgttcaaagaagtggggaaggaccccggccctcggccccaaaagagagtcagaaaatcctcctgggggaccaccatcctggcctgggctacaaccttctattctggggtctgcatacctcactgggaagcctggcaggcaacagaagggtttgggcatctgtgcttgggcagctgtctcagcctggccgttctgggaacatgtggctctgagaccactctcttcacagccaacctacagcaagtccctgagcaggagctgggctccaattgctccatctagactctaaagaaccagacagaaaatatttcacacttggcaggccttacaatttctataccaactacttacctctgccgctgtagagggaatattgcatcggccatatagcaacaaatgggctgtgttccaataaaactttatggacaaaataggtggtgggctggacttgcccacaggctggagttttccaattcctggttgaatgaaaactccctggaggcagcaacaggacaatgcctcctatgaatcctcccatccctagcacagggaagcactggtgaaaagtttgctccatgagaaaagcagacagtaaaagaaggtctgacagcgagcacgtggggaagagggcgagcacttgagtctcttggattgaaagccctgagcaccatgcctcctgtgttcctttggttccatccacggacttagcatcaatcctggcattggtggcaaatcttcctcctccttgacattagaacagcatgggagggcactgcccatattgttggctactccccaaagaggcctgtgaggcccagccccagaagtccccaccccaccacattcacctcctgcaacaccttccatggttgactgtccagaggaaggctaccacccttttgaaacctgctggcctagaagcttctgggcctggagccctggcttgatctccccatgggcaggctgcctctgggaggctcttccactggtttctctccccaggcagatgatcccatggcaagggagggtgggcgagaggtcctggaagggcaggcactctggggaaatccacagagagcgatggatgaagggaaagcccaagcagctggacccaggagagcctggctgcaggcctgcagccaaggcaggagggagggacaggcaccgctggcaggggcttggctctgaggaagggatcagggctctgcaggagctggagaaagtgtccagggatcccaattctaaaagcgcgtatttgcaggaaaggctccaggacaaggtggaagcatgaatggaacactgatcaaagactggaatcagagccagaggtgggagagaatccaacaggctgccttcatgctagggatgggccctgctagtctcagactactccaactgccccagagccaagaggttctgccaacaggccagtgagtatagagggaagggaggtcaagagaagagtgagcagatagacagaatccagaagacatcagggtagggctactcccaaggaagataaggcctttcctggacaccttggagaaccctgccccatttatcctcctcagaggagaggaaacagcaataacttgtgttgtgaacattccatttgagaagcatcacaccagactgggagaacacaaagttcttggaaaatgttactaatattgagtattctggagggccaggcactgccatcatgttttacatgcattatctcatttacacctctggaataaccttataaagtgagtgttttattcccattttacagatgagaaaactgaggttccaggatatattaaatcatcttctcgcatccaacaaagccaacaaatagcaaggttggactcaaacccagttctgttcaactcccacatatttcctgcatgcccaggaatgagattccaatcacttaacaaccagcatggatgtcaaccaagcaaaatggatgccacatgtaaacaatatgtacagctgaactgagaggccccaggcaactcccacatgggatcgccagacgctgcctccccacaaccccaaaccccaaacatacagcgcaacccatctaaaatacaaacagcaaaccatcctgacgttgtctccactgatgaggaaagggactcaaaactcaatgagtctgaaaccccagtgtcccccaatcaaacaagctcactatcgagggatcccatcccagatcagatcagcagagaccttttaagagcatctcgcccaactcccttactttacagacaagaaaacctacgtcgagaggggggaagtgactggcccaaggtcacacagcaaactggtggctgatcctagtcccaagaaacagaaacactcattcccaccgctcagttccatccgtgtgcacgctgctggtagtgctacaacttgagtctctccttgcaaaaagcaatctggcaatgtggaatatgagctacaaaactgtttataccctttgacctgttaattctccttttgggaataaacccttgggaataatccaaagaaaaagaaaaaaaaaaagtaatttgacaaagatgtgcgtggcagcactgtttgcaaaattggaaatttggccaccacccaaatgcccaacaatagcagtaagcaaacagtggttatattaatgtgctgtagttattaaaaatgacagctctgtagactaagtgagtacactagaaacattcatgtaagataccgttaagtgggaaaagcagaaaatgtcttcacacgttggttataacgaagcaaaacaagtaagtgtgttaacaaaggctggaagagatgaggagagatgaaaatggcttattgttcaattggacaattttttttccactgaacgttatttagtgtcaaaaatcattaaagattttaaagttatccaacagtgatggagaattagcaatcggagaacaatattgcattcaaatccacccagcagagtcctaaatcccacccatctccctcccatactccacaacttccctggagacctgcagagagatcagcatctgtctccctcgaaccatcttttcagaaagatgtcaacaaaatgctttggtcataagtggtgttaggaagttattctagatgtctagccatctccttgagactttagcaggagtaaaaataggttccactgaagcatcttggccatggagatgcaaccaaagaaatggaaccaaaagtaagagaaaagtggagaaatgaagagaaggtgagacagagaaactggggaggagatggtgaatatcaagcttcatcgaagtgcaattgagagaaattagatgcatagttggttccaggcccaggaggaattatgaaaatccttctgagcagagggagcctacatatacatatagctacatataagcagagatatgtagcctacaaagccgagcagaggtgctgtatttgcaggagaattggaagacaggcgacaggcgctggttaagctgagtaaagaacaaggggaatgcattggagaaatcctgagagagggacagaccatctccttgtagccccctcaattccttccttccaatggaatcataccaaaattcatggctgtgaacctggtgcaaccctatcatccaaggtcttttagtcattccaccactaccaccacatcaaactcatgacagccaatgtccttaagcagaggagggaacagttctttattgagcaatgctgtgagccactcactcagtcataccttgtgatgtccatactgtgatccccactttacagatggaaaaactgaggctcaagaagataatcaaggtcacactggtaaatgacagagcctggattcaaacttgccactgcgtttctcaccgtaccacattctacgaaaagaaataaccctaccaagggtaggcaggattccgggaaaatcgtgatatggcccacttctttaggcctttgtgccagtcgaatcaaggctaactatggccagaataaccatcaagagtttcaccattggtaacagcagaaattagacaagttataggggaaagaagcttctggagggagggggagctcttaaagtggccatctgaactcacctctggttatagttaaacttaggtcatcgtcattcttggaaaaagaggaaggcacccaccattgtgaatgtggttgttgtaccctgttaggctgggccagctttggggctgactgtttagaaagaagggtgtgtgtacctgcaacacaaggcccaacatcatagacaagccaatgaagggaccaccatgcttgctggccattgcactaggagacctgcaccacatgaccaggtcacagctgactgaaccaggtgcaggctccttggaggtgggcaagctgggaaagtcctaacagggctgggctaagctagtcagattctttctttgcagaattttaactggaaaatacaccaaggaggtaaagaagtgcaagccaaggccatgaggctgccaggggccacaagggaccaggagtgactagaagttaaaggtaaatagaaacgacaagaacattgagaagaagagaaagctgctgatagcaggagaaacagacagacccagaaaggagccaccaccatgcagggcacagctgagccatattcatgatgtctcactcagcagagagacacacagcaaggctcagtgctgctgggggaacaaggaaacaccaaagccaatagtcaccttggatcctgactttttttcctggatcccatgaccgatgcctgaatcctgtacttcccatgggattcccacttatcctgctgttggagccttacagtaaggtccatttgttgaggaacttgagtgaacgtctctgtttttacagtctaaaggtctgaacacagaaccgagaattgggttacatgcccttccaaacattcccacagcactgcatacctccccatcataggccagtatgacaatgcctgcttatctggttgtctctctctctagactctaagctccacgagatgctagagtcaccaaccaccattttattcccagaatctaacagtatctggcgcgaaggaaggaaggaagggaggaagggagggagggagggaggggaggggaggggaggaaaaagtgacacatgagtttgtgttgctaacagccagtcccgcacatggtcacatggaccaagagctgaagttgatcttcattctcttcaaactaatcactccctgagccagagctagctatccaagctgagtttctcactggtcaccactagtatattaggggaaatggttcttcatcagctgggatgtccagcacattgcaggatatttagcatccctggtcccctcctaataccaggagttccccccaatcccggccactgtgaaaactcaaagcaccccacgcatttctatttctgaatgcccttctgggcacttcgtctctagttcctttgatcatgtcttgctctcttggaaaatattgcaatggtgctatgttttttatagaataattgtaataataatggctgaccaagcaagtggctcacacctataatcccagtactttatgaggctgaggcaggaggatcacttgagcacatgagttggagaccagcctgggcaatgtagtgagatgatgtctctccaaaaacgttttttttttaattagccaggcatggtggcacattcctggctaattccaactattcaggagtctgaggcctgaggatagcttgagcccaggagttcaaggttacagtgaactacgatcacaccactgcacaccaacctggtgaacagagtgagaccccctccctctaataataataataatgactaacatccatagagcaccttctctatgccaggcactattctaaacactttatatgcattaattcacttgaacctcatagaaacctttattataaagtggatactgctgttatccccattttacagatgaggaaaccaaggctcagaaaagtcaagcaacatgccccagagcatagtccataagtggcagagctgggattcaaacctatatggttccaactctggagcctattatactcttcacacccccgaggctgcagctccaagctgacattgcccacttccccagccttaccgtctctgcctctttcctcctcggttatcccacatgtgcatgcaggcacatgtgcacacacatggtacatcagaccactagctgttcccaaaatatcctagcttcactcatgctggcccctcctcctgaaatgtccttcccttgcccacttgcagttaggtctttcctgtcatcagaaagtcctactcaagtagttctttctccatgagacttccaagcttcccccaggcacgatcaactattccattcccagaatctcccccggccctatgtcatgtctccattaagcatgcaatgcagtcttcctgggaacccagctgccttgtggatgttttgtcaatggctgagccaacttggagcacctagagtctgctctcagcatcttctggtggcccagccctcttctcccccaaccctgccccctgccaccagctatcttggagatcacttcacagttccagctctctaggccctatgccttctcccaatttgccatttctagcatagctttgaccaccaactccctcagtccccaaccctgtcacccaagatcccagagccaccacgagggggatgtcagttagctgcaagtcatcctaccagccaagttcgtaaggagcagacaggacctgaggttcccttacccttcctctgccctccccatgggctgcaggtcctgtccccagcacagatggcctccacaccaggctaacggcccttccccctactcgaggtccactcccagccattaataatagcagtaccatcgagtgtttcgttacttagcaatttgcaatcattaattagtggaaattgcagattggggccatgaaaggaggatggtgagattaagctcgttttgaaatcaagttaattgagtgatggagagggatggctctctgctccggagcaagagccccttctgtacctgctgagccagcctctggccttggaccagggctcagtttccccatgagtgaaacaggaaggtgatgaatggagatgccttgggctgggtgaaacaggagcatctagaaagatagacattggccaggcacagtgctcatgcctggaatcccagcactctgggaggacaaggcaggcagattgctcgagctcaggagttcaagaccagcctgggcaacatggtgaaaccccatctctaccaaaaatacaaaaaaaatagccaggcctggtggtgcccacctgtagtcccagctactcaagaggctgaggtgggaggatcgcttgagcctgggttggcagaggttgcagtgagctgagactgtgtcactgcactccagcctgggatacagagtgaaactctgtctcaaaaaaaaaaaaaaaggaaaaagaacaaaaaaagaaagaaagatagatagatagacattgggatagacataaaagactaaaatggacaccacagccactttctttttcttttttttttttttttaaatggaatctctctctgccaccaggctggagtgcagtagtgcgatcttggctcactgtaacctccaattccctggttcaagcaattcttctgcctcagcctcccgagtagctgggattacaggcacgcaccaccacacccagctaatttttgtatttttagtagaggcggggtttcaccatgttggccaggatggtctttatctcctgacctcatgatccacccgccttggcctcccaaagtgctgggattacaggcgtgagccaccgcatccggccaccacagccactttctaaactgatacttgttccaacttgcctacaggccccttgaactcctatggttctcccacctcctctgtgccttcctagccccaagaacttttccccagccaacctctttgaattattccaaattccttttgcataattatgcattattaacctctgggaattgattttacagacagtgtttaaggggaaagggttaaacattctcccctaccccaccctactccggaggaagatgctgagtagacatctcttctcccaaagctgaaagaaagatgcttctgcctgcacccatatttcttcccaaggagacacaattatctcccccacttcccttcccagcgagcaacaagacaacactggccctgatatacgggcggccggcgggctccctgtgctggatgaggacacatctgagagctgccgtccctaagtcatctcccctccccctcgcctctggggaggaatctcaatgaggaaggcaaagccaaggaggctgggaaatcctggacaggtgcccagcttctccatccatccaaacctaggacccagggcttgacagtccctcccccaaaaagtaggattaggacccagaaggacctaatagctcctgcctgttcctacatgcttgttccctgattcccagctgttcctacctcattcctgaccttccattccagccatagtgagcagctcagcatcccatccatcctccatgcctttgcccagtctgtgttctctgcctggaatgctgcttagtatcttggacatctgttccttcaacatgcactaagtagctatgttagcactactaataaaacgctgaataagacgagattaataagcctctgcctgatgcaacaagagaagacagtctcaccaaaaagtaactaaaatatagtgtagtggctgctatggtagagggagggctgcaaacggcacctgcagcacaggttgggtcctgaagtatacgtatagaagattagcaggtgcataagaaggctggaggaagggtgtttcaagcaaagggaatagcatgtgcaatggctcatagtcataaagaacacacacgcatggggagcttggaggagagtgtagactgggggaataatgctgagatgtggaacctcagggtctgagtgccaaggagtatgcagcagggccactgacagctgtgagcaaatgcttgcagctgagcaaaggatggataggggcagggagtgggggtatgagagagacagagtgataagcaagtgttaagaggccactggaaacaaggcagggtctgtgagcataaagagaaggggtagatttgagagacatccaagaagaatagtcaacacatccactgaaattctacccggtcttcaaggcccaattcaaacactccctcctccatgcagcttccccgatttcctccacacccgcaacaattatgatctcttccctctgtgatcccagactgctgagctctctatcaaactgatcatcatgttctgcctaatgttacaggagtctgcacaggtccctatcctccccaaatactccctgaagcagggatcatgtcttatcttcccagagcctagcctcttgccctgcacagagtaggcattgattttgtttgttgagtctaatttatttgaaatatagggaggctgtaatcaggatcgctgctaaccatgagaggtgtccacacatggaaaggctggcctgtgagggggaaattcccagcactgggaatgcaagagagaggactgttgctccctcattagagaccttgcggaggggagtcttgaactgagtgtgaggtcaggaggcatgcttacatctgctccaactctctggatctctaggtcccctctaagcctacatatgttatagggactagtcttcctttccacagagagggagactcccttaccttgggctgcataacaagtccccctagggatggggatgggtacctggcccaggattctccccacagtggattaagactgtgtccagggatttggagtcccttctctgagggcagcatggtgtctggccactacccttcctctgctcgatccccaagtgatgtggcctcagcacacattgttgtgcatagtagcatgggagctttgctgatccttagattgtaatccttcttccctcaagctggaagaaggggaataaaatctggagagaaacagagaggccaaggtctagtgaacagggtggatgacttcaagagctcagatgcaatgacctcttcatgcattgcccaaacatttattgagcacctaattcacaccattccctggaattgtttttccatctccacccactcattgcagctgcactgcctctatagtgacactggaaacaaaaaaataaggatggaggagaaacaaaacatactgaggcccacttacattaagcattctcttgggcgctttgtgaattggcatctctcaaactttagagtgcataagagtcactgggattttgttaaaaccagatcctgatttggtgggtcttagttggggcctgacattctgcatttctcacaagctctcagatgacattgaggctgcctatctgcagaccatgttttgaggaacaaggttgaatccttaccgaaaacaaaaagagaaagaaaacctgcagaaggatgttgagagattattttacaggttaggaagctgaggcttaacaaggtaaagaatcaaagaatggagtcctcagtccagagaccctggtagggagacagagcacatattacacagtctgctggagcaggggtatgccccatcttcagagagccaagtccaaagagggggatataactttattctgggaatacacccaactggatgacagatataaagccctgcccagtgggaactgcccagtcttgtaggggagacattgcttttgtctcaggggaccccttgtccttcagtaaaggcacagcccctaccctttgagaggttgttctcaaagttggctcagagacccagagagaggaggagaaaacaatacaacatcagggaggcctgtatttccaacatggagccccactgcctagaccggggaggagatgtaaggaacagagtgggctcatggggagccccttctcaagccactcaaaaacctaccccagatgcactgagctcctggccccaacatggagctggaaggtggcccccacgcaggggtgggccaggctatttaacactgtaaacaccacactttactgcagccattaggtccataacagcggcccatctatcctcacactggccctgcgacaccaagcactgatggtgcaattaggtagcagagagcaggctgtaaattgctggtacagccatccctccactgggcacagtgcggatcccctgcctgaacctcctgcaacccaggcttcagcggcaagtggtagtctccagcctcaggacccgcacagggactaccctctgaggctgggcccctgagcaccagaaagccttttgcctgctggggccagaaggaaccatcaaattctttgaatggctccgccccactggcattttagtgccagaaatttctggggtgccacttgtgcttccttagaggtcccttgtacaatctctaacaaccatcgcactgtgtcctggaaaggatgggactgcttgcccattagaccatgtgcttgcacagggctgggaacttttgaaaacatttttgtgtccactgggcctcacacatcatagaaactataagttagagaatgtacattttacttcataataatgtatgttccctgacaccttgggcaagtttcaccctctctatagaccccagttacccctctaaagtataaggacaatagaccacagaggttgcaaatcaggggcccattgaccccacagatgcactttgtatggctcacaagaggagggtttggggtgttgttgttgttgtttgagacagagtcttgctcaaactggagtgcagtggtatgatcatggctcactgccacttcaatctccccagctcaagtgatcctcccaactcagcctcccaagtttctgggactacagccatgcaccacaacactcagatagtttttgtattttctgtagagatggggtttcaccatgttccccaggctagtcttgaacccctgagttcaagcaatcttcctaccttggcctcccaaaatgctgggattacagtctgtgagccataaggagggtttttttttaattattcgattgttttaagatacacatacatcaggaaattttacctaaaaatccaaatgttcagtgtctctttaaaaatcagaagccgtgacagcactgggcccacatctctccatggcaacagtcatgtgttgctgcataactgttgcccctccagtgtgccccagacctcacctttccctgttgtgtatccctcagttttcttacgcctgacccacttcactcatttctgctaccttcctgtgggcctttaggttcctatctcataacctggtcaggaggctccctgtgtcctacaattctggattcttcaaatgaatgagtgaaaagatgaagaagatggttgactagagagttttgagccttaccttctttatgagaaaatcacaaggttcttcagttttctgacttcctagggcagggaatatctttcctgccccttgctccctcagaagatgatgaagagagtttataaaatattcagaataatgacaattgtcagggacactgaagtatcacgttgcacaaaggccaaggggagagtggtgtttgtggggttgagggagagggacccattacccacttaattcgaagccacagccaggctgagattccctcgcacagttcccaaggtctggctggtggcttagtgggctctcctgatcagcacctaggacagctccacccatcgcccaggatcctcactgctctatccgggcccagccgcttctgtcccacctacctccccagcctcctcgcctttccttgtgcaccacgtgggctttgtgtccattcctcactcttgccaagcccttccccatctcaggcgcttctgataccaccccctggaagttttatcccacttttcacagggttcctgctcgttctgaatatctcagcctcagcctcacttcctcagggagggctgcatcaaaactgcagttcaaattaaatctccatagatgctatctcattccttcatagcacagattgtggctgtcatgatatatagatatttgtgtgattactaatgtctccttctgcattagaataggaactccaggggcagggttcagaccagttccatttaccattttatatccgggacctaacatcagacctggttacacagttgttggatgaataaattagtgagccccttctgaatgcaggaactatgctaaaatatagtccctttcatggaataacttagagtttcattggctagttaaattccagtttagctggagttaaaaataatctaatcccacccccccaccccaataaaggaagtctttattcgactttattctgaagcatcaaatcattctatgattaggtgatggacccagggatagaatccagctcctcagttttccagtcaagcccagtctcactgtggcttcttccccctgtggttctgttagtttatctgcctgttaatggccacacacatacccccttccattatcccatcagccctgcttgggcattgctattgatggcatttaaccccctggggtttctgtttgctctggctctaccccattgctgctttcccagagagtctgtctgggcctcctcagcagctctgagtgtggacaagaaggaagatttaatgttactgctttggtcttttgtttctgcaaagcaaacccttcccctgctgggaaactcatcatcaccaagcatcaagctcaagctgagttccacttagctgtttgcaaatggcagtggggtgggtggagggtgagcagaaggcttgtagtccaaggagggggaacacagtgtttgtgagaaaacacaatggtaggaggactgttggggaggaagatgaggtttgtgatgaagactggctgactgtgagaaaagaatacaccagggcacaggtctgccttgcccacaatcaatccctgaattgaccatcttctgatcacaagcatggacattggtcagtacaggctttggcacaattcccatggtacatcctaggcagctctcagccttctatgagtggactgattatctcaccagctgagagtccctgggaattcttctaatctctatgggcttcactttactcatcctgcaaatgggaatgcttgcaaagttgctgtcagtatataacaagatcattcatacacacactcagggagggcttcacacatcataggatgcacaacaaacatgctctcctccctgtaacaagtatttagcctcgcttgctctctactttgaccacaacttgcccaacagcagggctcacccattgtggctggcccaggactagtggagagggatggggtaggtggcggccatgctagcactctgtgtcttcatctatccctgcacctcctccagccccatgccttccttccttgttcattccagtcatcagtgttctctgaactgcaggcagagtaatgtattccgtggtcagaacgtcttctgctccctgctgctgccatctctgtcttggtctccctcctctccaccccatgagcatgaagacaaaatacccatagatgagatgaaaaggatagaggtaaaaaaggacagagcagaagaaggggaccaagtccccccaccgtctcagcttccctaattgaatgactctcctacctgactctcctgtcggctcccatgttccttcattctccctgatggccctgaaatcatctcccccatctcatcaaatctctcccccttcctcctgcttgttctctaagccgcagattactttttcataaaattcaatttctagccattctcattacttactcacttaatgtggcggggagggggagcagaggaagacgagggagggagatggtgtctgtgcagcacttatccagcctagttaccaaggcccctcgctgaggtgtattagagtctgataagaccagataatggacttctgtccccacacagggagctggcattggcgtattcgggtattgcggcatcatgtcggagggtggcaacacttacaattgtcatccgtgactcctctcttgctgggaagagtccactgggaaagctatttgttcaacaaatattttcagagagaattttattcacctgtcaccctactaggcactgggagcacagtcataataaagaggggtctctctcccaggcccagtggtcagggaagaattcgggaggaagaggcatagaagaagatctgaataggaattatataagctcaaagaagaaaacaagtatcttagtttgggttcccctttaaaaaggagcctgaaacaagggcttcggggcagataatttacttgggagataatcccaagaaaccagagggagggagtcaaatggggagtgagacagggaaaaagagaaatcagtaaagatagattaagtgagttacttctgtagaaaactccagaccctctgcataaccacattgaatatgccacagaattatcccttaaggaaggaggataggacattatcctctgactcctgtccccattgtttgagggttagccccagtggtattcatttccctgcactttcattatgcttgtacaggctgagcagccttctcagacttctgagaaagccctgagtctgaaaagcagagagataccactttgcatgcttgggataagatgctggcagcatgcccagaattgtctaccacagttgcactgaaatcagatcaatgaagggaatgtggtgtggggcacacaaagtgtctgctacagtccaccccttgtagagctcagatctgcctgtgacccaaaataagttcaccttgttgctgaattttcaagaaaaggcaggccttaatctctattttctaaaacgttcttcagacaggaaggttaatgtgtcagggtacagttccaacagctacagcaggtcctgagagatatccatcccccatgccctttaccacttactctatatttcctttaccctcagcctacctgattctgccagcctgggtcacttgctcagtgaggtacccagaccaacatccatgagacaggtaaggggggtgagcccctggttgcctcagtcccattaggctgtttttgctgcaattacctattcactattatcatcaggtatggaaacattaagagatgcgccagtgaaccccctgagttccagacagagtcttccccatcctggttaggtagcagcaaccccagctctttgtgaaaatcgtggtcaattactccgaccttctttttgctagtccactgacatgaaggattcaaagtgaccagggatcactcagggtcagtcacagtagaactctactgtgtctccctgtagaaccggaacctggcctccaccagagcctagagttggggagacagaaagcacatcttcttcttgaaggttattggaagtgatgatagatggacccaacttgcttccaacccttgtttcccagatgtatattctagctctcgggggacacagcaccatgcatgaaccattggttcaatgcataccacatcctggaggtcagtaccacaaccctgcaaggtattttccacaaactggtgtcttctccaagcctttaataggctattccagtattctatcaggccacctgcttctaagtggtctggtgtataataggaccagtgaattacatgtctcatgactatgttgacctcctgcaccatgaaataaatctcttggtctgagattatgtttttgtgggatccgatgcagataaatcagtcacgttttgagatctcagatagtcatactagcagaggcactgcaaacaggaacaacaaatcaaatcggatgagggtaaaggccaaaaaagcgaattgagtagagatatgatggagacaaccaccctgcatcttttacatctttcagggtggctctaatctctgcaatttcacctggatagcttttgactttctattttggctggagaggggagcagtttcaagagattccatttagctcttcttaccataaaaactcttactccacaggtgagagcaccaatgtgagggtctgccaacatctaaatatatccatctcaataatgcatacaagggttagggaagaatagtccagggactattagaggtactggaaagtgaatgtagggtagaactctaccacattgccttcacaaactcccaatttcactggggaactttgatggcatcacaggccaggtcccctagcatcagtgatagtcagaccttgtattcaacagtgctcaaaaggtctgggtgatcccctgtctttggcaaatggccaagggtccctttgttgaataagaaagggaatatttattgtatacactttggtaacatttcaggttcttcctcaagaggacctggttttccatcagtggatgggctctgggtctgagaactagctcagatctggacagaggacgaggaatcatgattttctattgcagtggctgatatcagccattagataatcagtttgttttgttttaattttcttgtggttatgcaagtcatggaataccctcgttggccacctattatctagaccctgggaacaccatggtgtgtttttcaggaccagagctccttgtatgttaaggcacactggtggccactctggccttgcttcctactacagtaattatgtccactttgcctctgattgttaatgccaacaccagacctctactagtccaggttcttctcttctccattgacacagagaactcaaccccatggcttcatctcctgtctgctccagcctacagaggacagccaccaccaagccactcattgaggctggagcctccctcactagtgcattgcttatcattctaatggtgagagtgtcctattgcccttctctgggtacatagatttacatgataggttttctggttttgtgtaataaaatccattctaatacactcacttctctaacagttctgacatttccaaggagctgtccaagcagcataagaaggctccaggattccctgccaaaacattaaatcctgtcttggaagagtgtccccatgtcaataaatgtcttatttccagtctatattccaccccacccaagtccaacttctcgaattccattcttatacatatttcccagtttcagctgccatgcagtagccaggtcctcctgcaactctttcagtgaataagctatttcctcccttaacagggattatactccctctcttgagctatgctaagacctgacctgagttcttttttgttttgttttgttttgttttgtttttttgagatgaagttttgctcttgtcacccaggctggagtgcaatggcacgatcttggctcactgcaacctccgcctcctgggttcaagcaattctcctgcctcagcctcctgagtagctgggattacaggcgcccaccacaatgcccggctaatttttttttgtatttttagtagagacagggtttcaccatattggccaggctggtctcgaactcctgacctcagatgatctacccaccttggcctcccaaagtgctgggattacaggcatgagccactgcatgtggcctgacccaagttattaatctagatataggtaggggcagatcttgaagctggacaagtatcatcttgcaaggcatctaccacaagagaggtttctgcataagagaggcaaggagaggctgatctactctaacaagggggaagaggctgctattgtcagccaggagggttcaggggaagctggaagttcaatgttctcagatgtatccacccaaatatccccagctcatatctcacagtcccactccttctctaacagggatctgacttgagcctaaaagacctgttaaagctgcatgttaaaccctctttgcagctttgccttccttatcattcactcctggccttggtttttagcattgctggtcctgtaccacacccagtccaccaagtgaaaatctcaagaatttagatgctcagtaaattaaaagtttccacacaccacactggatgcctgcaaaggagtccttattgccatctgactggttaatgatccagttccagaatcccatactgaagaggagctttttagggtgacttctagtatcagctgtcatagttgatctctccctaaaagcagaacctgaaacaaggtcagagatgcaggtagttgacttgggagatgatgctaggaaactggagtaagggagtaaggacagcaagacaaggaaggagaaagaccaataaaatgtatatggttggtctggttacactgtgggctactggagctcagtcctgctgcagatcctctgaagaactacgtagaacacaccttaaaattgtttctccaggaacagaggacagaaacacttgctcactaactactatcccccattagttcccctgaggatgtaaactatcctgctcagcaactttccaccactttggagaaagccctccatcagaaaaacagaaagacaatgtagcctgtgtttcagacgggaatgcctggaagtgtccgcaatagctgtgctgaaatcagatgggctgaaagggtatgccatgaagcaaaaaaaaaaaaaaaaacaaaagtgctgcaaataatgtttctgacagcagcaatagcacatgcaaaaaaaaaaaaaaaaagtgagagagaagatggttacagcataggggctgggggttagggacttgaggcaaaagaggatcataaagaatctagtaggccatattaagagtttgaatttcactctgaaagaatttgagagccattgaagtgttttaatctggagagtgaaatgacaatgaactttttgtagagctttattatacaaaccactaattgtcacccagtatcaacactccctgtcttcatcagtgcctctcatctttcaatgggcacaggactccagcccaagtctctcttacatctaggagtggccacaatgttcagtttgggccagtgggatgtgaatgaaagtagtgggtgctatccaagaagtatccttaatgggagtgtcctccttcctgctgtgtggactggggatataatagctagagctggagcagccatcttggtccatgaggtgacaagataaaaaagtcagggcattaaaataaaaaggggttgcagtgcctgacaacaccatggagcaaatccaccatgccagccctgaacttctcacctgcagacttttcatgtaattttgggtctctgttactcatagtttaacctaattctaactgacacagggctctagagtgaataccaacacatcagttagaaagttattacaggtaaagaatctaggcaaagggtaattgtagcttggactgggatggtggcagtgaaaattgagcaaagtgggtggattggagggatattttggaggttaaatctatggcttggtgcttgtgagagagtatgagggggttagagataaggagccctagggtttccccggttccagacatgagcaaagggatagtggtgggacctagattgggttttttggttaggtgaacatatacttgttccttgtttccaagtagggactgagatacctggtatgagccccacaaaggcccctgctcccatgcaggagaccctgaactagcttccaaacacacttctagatttacctctttggtgaatcttcttggattattcctgcatccccaccccaaaaccacttgatttattctatgctcttgatatgcccaacatctatttttcttgtttcatgtagaactcagcaaatttcactgagaaccaaccctatgctctgtgtgtgacagagatggcttgatgggagcagagttaactcaggagctgtgttagacaccaagaataaaaatgaaaatgagcaataagcaaccacaggtagctcacagcaaagaagtttgattagtaaacaaatattgtcagcaccatgggatccatccaatgatagtgtgctctgggtgcttcatttttccaaggaaagtggttgtccttggaacaacctgcagggttacagaagtcatcacagatgacggcgcatctggaccaggctttgaagctaagatgagggcagacattcctgggcaaaggtactcacctatacaaggacatttaaggaggaatccgtgtcataatttaagagaattgttagctgttgggtactgttggagtgagagttttcacagttttttggctttttttgtttgtttgtttttatggcaaaagaatggattggaaactcaagatgtgggcagggtccatgtcagagggaacattgtgagccacactaagtggcttgtaccataggcatgggcaacagaggggatggggatgaggaatttcagtcaggagagtgataagatatataacaaaacagaaattctgattgcaatcattgctaacatttactgagtgctttcttatgtgccgatactggtgctaagcaatttaccagataacctcatttactctccacccagtaagataagtactattagtatccccaggttcacagttgaggaaacttagatccaggcagattatgtaactagctcaaggtcatacagctaatatgtggtgaagccaggattctaatcagagaggtccgccccagagcccatgcccttagccatgatgctaatgctaaaattccctctcattgcttatgtaatgagatgtgtaatgagatacattactttgcgactatgctttagaacattccatatgaggaggtaaggaagagggggttgcagagcgttttgtacaaaaggagttttcaataaatacatcggaccaagggagaaatcgcataataaagaaatatgggattttagatggctaaaattaaaacactttaaagaaaacatgctcaactccccatattcccagggaagaaactgaggctcagagaaagggtcacacagagagttgatggcagggtcaacctctggggcctgactctgatatttttcttacactatcagggcaatttagcagtcttcatagtctattcctacatagcactatctttccgaggtcctggcaaattgtactcgctctctggaaggacaagaacaactttgttctttttctttttaaacagcagaggtcccagaaacaaagccaggattggccccgagaaacttgatgtgcacactgcaaagtctgagacaacagagagttagtcgaaggaaaagcaaaaactctccccaaagccatcattatggggaggattttgaccacaaaagaagaaaagagtaacagttcaaataaagaactccagtccaagtccccaaatcccaaagtgagatccagtgagtctgccctgaacagaaactgcttaccctccctggtcaaggtaaaagccaaggagataggcacccaggcttcccatagggaaaactgagttggaactctgcacccacccaagccatgtctccatcacacacacacacacacacacacacatgcacgtcatcttccctcatcaccccacagggtgcccaggacttttctagtgtctgcaaatggaaacatattaaaggtgcaagacatttagaataatgcaaatgcctagaaagggcacacaatgtgggcttctttctcctcccttgacatattgtgactaagttggttaaatgtctgctctgtgctctgtctgaaagggtagccagtggtgtggtgtagaggaaagagcactggattgggatccataaggttctgatcctcttagcatttgctgtgcttcctatttccactttctgagcctcagtttgctgatctgaaaaaaacaaataaacaaaccaaaaacagtctttccagttctaggagctgattaaaatggagcagcctcttcactgccccctcccaacaaacacctattgccccctgcctttgctcctactgttcctcctactggaaatgccctcccacctcccctccaccaattcaaatcaaagcccagttttctccaagaacctttccctaattatccccacaactatgtgtttcttactttgaagctcctcagcaagtctgtgctatttctcacacacgttgccttacgatccttcatgcatgaatggattatccttctaattggacagcagtatggtttggatctgtgtccccacacaaatctcatgttcagttcccaatgttggagggggggctggtgggaagagattggatcatgggggcagtttcttatgacttgtttagcaccatccttcttggtcctgttgtcgcagtagtgcgttctcatgagatctggttgtttagaagtgtatagtaattttggccaggcacagtggctcatgcctataatcccagcactttgggaggccaaggagggcggattatctgaggtcaggagttcaagatcagcctggcctacatggtaaaaccctgtctctgctaaaaatacaaaaattagccgagcgtggtggcgcgcacctgtaatcccagctactagggaggctgaggcaggagaatagcttgaacccaggaggtggaggttgcagtgagccgagatcatgtcattacactccagcttgagcaacgagagcaaaacttcatttcaaaaaatttaaaaaaaaatgtatagctttttttttttttttttttgagacagagtctcactctgttgtccagactggaatgccgtggcacaatctctgctcactgcaagctctgcctcccaggttcatgccattctcctgcctcagcctcccaagtagctgggactacaggcatgcgccaccacgcccggctaattttttttttgtatttttaatagagatggggtttcaccatgttagccaggatggtctcgatctcctgaccttgtgatctgcccgcctcggcctcccaaagtgctgggattacaggcgtgagccaccgcgcccagccatgtatagcactttttaacaacctgctccagccatgttggatgccttgcttcctctttgccttctgccatgattggaagcttcctaaggcctttccagaagcagaagccacaacgcttcctgtagggcctgcagaaccatgagccaattaaacctcttttctttataaattacccagtctcaggtatttatttataacagtgtgagaacacactaaaacagacagcgagcttctccagggctataaccccataccagtgccttttccattgtagaacctgtgccctggggtgtacctgtacttagtaagtgtctggatcatgccaccctccccctcaaccccctctgttgggtgaggttcaggctccacgctgtctgcaggatagtgtcattcattttctcagcaaatattcactgaacacttactatgtgctagatggtggtaggtacgggagatgcaacaatgaatcagtcacagcccctgacttcaaagacctctcaggctgacattcaaggtcatttacatttggtccagtctcacctctcagtattctccttctcaaacctcctctagctcaggatggttcttctatccctccttgattttactcatgctaaatcctttgctgggaacccctctccactcttcaccatcctcataaatcctaaagtatgaagaagagaaagaaaagaaaagagagagagaagaggaagtggaagaggagaaaggattatcagaaaatataaatccagcccaaccttcaagggtatagagaaaccctgaagtttcctataccaaactctatcctgttggttagtatctagatgcctactgtctagtgagaaggtcagtgttggggtcgcctaaaggtgaagtccaggcaacttcccattcatcctggagatgaccccctgcccttaccatgcacactcatccttcctcctggttcacccttcagccactcaggctgctaacttactccttgtgcctttctggaggcagtaagccagaatgcccaggtgaatggctggctgagccagtaagtaacagacaaacctaccatacctggtatttttccctaattggattaagaacaaaatataacttccctttgtttcctcctaatgcacgctacagatcagtgctcctaataattagaccccagcacttcctatgcaggaacacagggaggccagtgggctgcatctggagacacatcccctctctttggcccagcactcagcccctgttcctaaccactgcccagccctgtatctacggcatgttctcatgagaaggtaagaatgaaggctcaaactgcaggggacagaagagaggcatcaggcctttctttgtggagcattcacttcccttgacctgcactcacgtccctgagctcttggaagggaagacatcgtgctggggcatatagactcgagtagctcttggccataggggtagaggataccacccacactccctacagattaatcctcctctctcccctgattcccagccaaacttcatccatagccaccaatacactctgatgagggaggttggatctaaatccttctccgtttgattaggagttcctgatggaaaagaacgatggctctgcaaataactgcaagcccccgtaggacccaggccaagactcctcatgtcttcagattggggcttctgtgagtggaggcctttatccctttttcgggctggagcacccacacaacagggcacttcctcccccatcagattgggagttctgtcgggaaaaggtctattctccctcaccggctggaggcttccccagaacaaggcctactagatttggttaaacaggtatttgcttaactcctactgtgtgctgatgtgctggatacttccctgaacaaagactgagacctggtcctggccacaaggaggtgacaatgcagaggaggagacatggcaccctgcataagaccagcagctgaggtcggggctcagctcttcccatcctgacagccatccgaaggaaataactaagagatggatgcatccagaacagggaagcagggtctggcccctttctgcactggctgggcaaatcctgtgaccttagttttttaaaccataaaatagaaatggcagagcctgcttcataagagtcttgtgaggctcctgcaaaacaacaggtaaagccagggggttgggtgctgacacaagcttgaggggctggggaggagccctggcttgcagcatgtgtccatttccttgatttcaacactcccctcaagacttgtttcaagatacaaatatgatgtccctgaaatgggagcagggaagagatgtgccaaattggctttcaggagctggtgtgagccggccccagcacatcgctccttagaacatactatatgctcaggaaatggtgagctcctattagtacctgatcaggccatacctagccccctattttttcaaatgtctgagcatctcccttaaatgggatatgaacaagctgcagcattttggagaaggatgacctaaggatggaacagtagactggctattccccaaaccgtgtcccatttcctcttgggcacaccaccagactctatttgcagcctctcttgcaggtagggcagccatgtgactgagcgctggccaaaggaatgtgggcaagtatgacgtgcgtcccttccagacacaacccataaaaacctcccaggcagccttcaggttctctcttccccatgcactgtctaaatggagaggaaagagctccaagatggaaggaaacagggatgtgggattactgcacagaaggttgcccactgaatacctgcactggacaaatacgtgagtgacacatcaactactggtaattaaaccactgagatttgcagacagggtctttcttacagcagttggcttatcccaactaatacaggttagctcacaacctcaccacatgacaaacagctgaggaactgttgccctgtagaggaggaggttcagcagagaacattgtacactgtccttaaatactttatccatcatcttagagcagagttgacccaagtgacatgagacagcagctctaggaccagtggcaggaaattcccagggatgcagattacagctccacacacaggaaggtaatgttaacagaggcacaacaggtgaccttaagagacagcaagcttctactcctggctgtgcaaacaggtgagaatgttgcagaagccacatgagcatcagctagcagcttgacatcagtgacataacgcaaaaacattctcaagaccttagattctgtgatcttatgatctgtcatccccaactaggatgctgcctcctccatcagtctaagatctccctaggcctgggctcgacactctcaggagaccaaaaaccctcaggacaagaatgctaactctttttcttttcttttcttttcctttccttcttttttttttttttttttttcttttcttgagacaggatctggctctgtctcccaggctggagtgtggtggcaccatcttggctcattgcaacttctgcttcccgggctcaagccatcctgccacctcagcctcccaagaagctgggactacaggcacacattatgatgtccagcttatttttttgtatcttttgtagagacaggactaactttttttcagaatctgccctagctgcccctggcctcagcacccgttaagagccccatgttcaaatgtgggggccaggcttagtgtttagggaagacatggctactggggaaagctggatttgagtccccagatcctacattcctgagcaagaatacacggagaagtctaagtagcagagaggcagagggaggggattgatctgaaaaataatttgtggtggaggagaggagggctggctgttcccatgtccggcaaaagcagtgatcttcagttctctcagcattatccaaggatgaaggctcagcaagagaggccttggctcatctctctggaggccttctgacatgacagtctggtctgtgttctatcaacataggcacctgtgcacatgcacgaacacacacgaacgcacacacacaaaccttttcacctctgtcctggcctccagagagaggcctgctatctcctcaaatatttcccaaagctaagctcccaaaagcaccccgaggtttccagaaaatctgggggctgggcctggggaagtggcagggaaaatccacagagaagaaggcttcagggcattttcctgtaagagtcattaagacatattaaattctgacgcttcctccccctgcctatgccagcttcacctccacgcaggcctccccatcgccacgtacagaacattagggctaaattgaattagaataattaacttttggtcacacttttaatttggtgcaggaaataagagagctaatggagattaagcaaggctctgactccagagaccagcctggaagctgcacggggaggccctggctctggagtgggggaaaataaacagccagagaaaagaggctgaggcagatgtgtgctgtgtgaactggcaggtatgtgcatgtttgttgatgcctgtatttgtgcttgtgtgtgtgtgcccttatatatgaaaacatgctctgtagcatgtaggtaaacatgtgcatgtacacacgtgtctgaaggtttgtacacatgaatgtctctttgtacatgtgtgagtaggagtgtgcgtgggtgtacacacattgctttaaaccctgggcaagtaaaactccttgatttttatagaatcctagcagctctgacttagaagccaccttcataaatatcttcaaacccagtgtctccccacctgcagctagaatctcttctacaacattttccccaggagagcacacaacatctgcccacactcctacactgatggggcattcactaccatggaagacaccctgtggagctctgattgttagaagcacttccttcctgcaacattcacccagagccctagatccaactccaggatcacacagaagaagcccaatctctccccatggcatcccctgaagatgatgactgttcccttcttcatagtctcttctctgggttagaactcccccaattgtcttctaggacttcacatgacatgtgacattggcacacagcacctaacacccaatcacatgccaagcatgaagagtccagctgggatggcactcatgccagtgggtgcttaaggatcatctgctcaggccatagtcaactcaaacttcacatgcatcagaacatccggtgtgatttttgaaaatgtagattccagccaggcgcggtagctcacgcctgtaatcccagcactttgggaggccgaggcgggcggatcacaaggtcaagagatagagattatcctggctaacatggtgaaacctcatctctactaaaaatacaaaaaaattagccaggtgtggtgacaggcacctgtagtcccagctactcaggaggctgaggcaggagaatggcatgaacccaggaggcggaagttgcagtgagccgagatcacaccactgcactccagtctgggcgacagagcaagactccgtctcaaaaaaaaaagtagatacccaggcgcttctccaggagctctgattccaaaggtctgtaaagggcactggtcctcgacattttaaacaagcagccagatggttctgatgcaggagcctatgaaccattatttgccatggtcccatggtctcattttacagataaggagactgaggcccacagagaggaagagatgttcagagtaagttagaacctaagccagagctgcatcctgtcttctactccctggtgcttgttcctaacaccaaccccaggatggataaacagagacttcatccctgcaagcccacattcccctgggggagcccatccccaccaccaccacagagacaggcccagatctaaaagagaagcatccttccgcaaaccctacatttccatctggtcccacaattatctctggccagggtgtcaggaagaaagagacagggatccgcagccctgtgtctgctaaataaagtgtcctgcaccctggaggagctgagattcatggaggtcactgctacgttggagggaaattcccatcagtatatcagaagcagattggggtcaggaccccaatgaggatgccaaggtgtggggaaggagccaggtgagagaaggccagtctggagtttccagtgcaagaagcctagacctgcagggtccggtgtcagccaaggcctcatccccgctgaatccgttacctcccagagggcctggccacatgcattggccacactgacctgctgccatccacccaggggccctgatgacctctagtcataaatggggactgaagaggagaggtgaggcctcagatcacatagcttttcagtccaggctcccagctcccagtctgtgtcctttacagtgcaccaccctcatgccttgtgcaagaagccagcaccaatgggaattgtcacaggaggctagacgatgaagacagacaaataacaagcctaatgtcagaccagatctgctcccaacaaagtcaggataaaatcaaagtcccagagaccaggacaggaaaaactgtgtttcaccaccagtgaccttcctcattacctgcaatcattgtctccctgtcctggtccccaaggctcctctcactttctaggattaagcgagagtaggcaggcatctgcaaaattcagagccctgtgggtactgaacacaggagaatagaacagaagaaaagggaattttgcttcttttgagcttgcttcctgatttcattcgacctgaggtctgatttctcttaagccaatgcattccatttccaaggctgttttgaaggtgagattccccagagggaaagtgaggcatccctgactgcttctggagtcactcgctgtcatgatcactcaccaccaacaccattttctccccagccttggccccccagccctctgcttaaaatgtgtctagcgctagagagctgggagcagtggggctctgatgaaacagtgagcgaagagtgaaacgagggaggggacagcaggctccagccccctccccaccccactgcaacagcaggggtagagggccgggctgggtaggtctgtctatctctccagctgctgggaagggtgcaagtgacgagggcaacgagggatccctgccccacctatgggaaccggttggtggcttggcgggagtgggtccaggtgggaaatgggtgctggtgtttctgaccaagttccaccctcactgagttcttgggaacaaacggctcatttctcagggtctcacgtccctagttttctccccggccctctctctggtgaatgtaggggaggaagatgagaagtggacaagagacatcaaggaattgtaactatcttaaggtcagaaggacagggtgcaggcgctgcctgcagctcactacgcacatggccctggacgggtccacttgtccttggagccagtattccctgtaggtgtagtggtggcttattgctgacccttgcatggcctgatgcctcacattctattccccatccactggcatctttcattccttccctgcttcctgtctttgccccatgatgaacgttgaagtaaaatcctgagtgctagaaaaggcatgtgctcgggacactgacttctccagtgatcaggggaggcccctgagaaagcaacttggtatctgaaacctgaaaggtgagtgggcttgctccagaaagaggattgcagaggagtgttccaggcggaagaaatagcttattcaaagccttgaggcaggaaatggcttgactcattttctcaagcactaaagagagcccccagggtggggactctgcagatggggccaaagggtcaggcctctgcctgctggtgcaggtccttgaatgtggtagtaagggttttgaattttatcctgagagtggctggaagtgactgaagggtttcaaacagggagaaactggagaagatttgcatctttaatagcccactctagctgcagcctgaagaacgcagacacagcagacctgttaggaggccgtgagagggctggctcggtggctcgtgcctataatcccagcactttggaaagccaaggtgggaggattgcttgaagccaggagtttcagaccagcctgaacaacatggcaagaccctgtctctacaaaaaaaaaaattaaaacaatttgctgggcatggtggtgcgtgcctgtagtctcagtaacccaggaggctgaggtgagattctctcaccttgagaccagcggggtggaggctgccatgagccatgttcacgccattgccctccagcctggacaagagagcaagaccctgtctcagaaaacaaaagaaaaacaaaaacacagaaaaggaagccatgagaacagtcctggagagagacaatgccagctcagaccctggtggtggtggtggagggaacaaagaggaatggagggaaccaagatgctatatccttaggaggaaccaacaggccctggaatttcctagatgcgggaataaggagagggtacctggggagacatcaggcccagaagcgcacatgggggttgcacaagcaggcagcgtctgtttggacaccaaagctcccactttctgcataagctcagtcaagctccttaattaactactgtgagtctcgggggccttgtctataaaaaggggaaaatgccttctaagctggtgtgatgatttaaattaaattgtattggtatgaacagtgctcagcacctaatatgtatttaacaaaattgctttccttgccctccctcctatgtctagctcagaagcttgccttgcaagttcagccctttcttccctctggggcgtacagtgtggcagtgaaggtcacccatccccatgacccccttacctcctactaaatacaactctatgccagagcaggtactgagctttttcatcttgccacctcatggaacctcactaatgttgaaaaatgcatctccctgctccggttcttgcccccttcacactaggctccacccagccatcagagccatggtgttaagatgtaaggtcatggcactgctctgctccaaacccccacagcggtctcactcagggtaaaagccagagtcagagcaatggtccacagggccttgcctgctgtgcttcttgtctctctgtccctgtcacctcccactctcccctgcatcctttctcccctagccacaccagcctctctgctgtccctcactcctgcaggcctgctcctgcctcagggactttgcacatgtacagatactcatatggcttcctccccgccttcagttctttactcagacgtcatctgctaggtaaggccttccccagctgtcatcttcaaattgcactgcagataccccaacccctttctgtactttacttctttctcaacaacactcatcctcattaataatgctgtatatcttatttatttagttttttgtctctgccctctaaaatgaaaagtccttgagagcagagatttttatccatttggttcactgtcatattcctcaatacttagtgcggttgcctgacacatattgaacatttgaaaaatgaataagagggagagagaaagggagggacggagagaggaagtgtcttcttcttaaagtccctagttgctatcagaagcactgggcatctcatttcatataagagcaggtgtcagccgggcacagtagctcacacctgtaatcccagcgttttgggaggccaagacaggaagattacttgagcccaggatttcaagaccagcctgggaaacatggtaaaaccctatttctacaaaaaatacaaaaattagccaggtgtggtggcaggcacctgtagtcccagctactggggggctgaggtgggagaatcacttgagcccaggaggtggaagttgcagtgagccaagattgcaccactgcactccagcctgggcagcagagcaagactcttgcaaaaaaaaaaaagagtaggtatccatttgtggtcagggttttaggtgaacaagaagcacacagttaattctgagcattcaatgctcaaaactaactgcagtgagcattctgactcacagagtggaggaggcaagtttccaaccaggggcaagatttataccgggctggcataaatcacaaatttgctgtacttcccgagtgacctccaccgccaccccagcatgagaagatatactagacacagaatccagagcatcttagcatgtccctggctcctggggccactcaatgaaggtgctcagtgccattaagatgcacagagcaacgtcaaccttgctagtgaggccagtccgggtgcaaacaccatcctgcctttggctggctcagcgggctctggattttactgtatctcactgaccttccactttcctgcctttaaaatgtaggtgataatagtcactgtgcattctaccccacagtgttttggcaaagctcaagtgtgtatgaaaacataaacttctacacaattatttttctagtcccctttaatctctaaattttgctaaaggaaaacacatcttctctggatccctttgcttgctttcttgctttgtgtctttgcgtttctctctgtctactttttttttttttttttttagatggagtctggctctgttacccaggctggagtgcagtggtgcaatctcggctcactgcaacctctgccttctgggctcaagtgattctcctgcctcagcctcccaagtagctaggattacaggcatccaccaccacacccagctaatttttgcattttagtagagacggggtttcaccatgttggccaggctggtctcgaactcctgacctcaggtgatccgcccacctcagcctcccaaagtgctgggattacaggtgtgatccactgcgcctggctgcatctctttttaagtcaattgttatgtctgtctaactgagcctccctttgtgtctgtgtgtgtgtccacaattctccctcctctgtctctgagtgtctctgttcctgctttcctctctctctgcctcactctgtatatctctgtgtgtccctttctgcctcggatttgctgtttgtcttctttgtcttctccctcttctcagtttctcttttgacttcatctctctgcctcactgtctgtctctgtgtgattatgtttcttctgtctgagtcctaccatctctctccctctctgtctctgtctctcactttctctttctgtctctatctgaatctatgtgtgtatctctgtgtgcactctctctctctcgccctctcgctctctcactctctcgctctctccctacctcactcgcctaattgcttcttgtctctgcagatcgctgtgaggatttatgtaacacacagacaggggtggcagtagccaatttgaaaggctgctggcggacataagaacttaatgctacaccagtcttcaggaaaatgagctgcgatccccccaaagcctcctatgctcagcgcagcccagaccatcttcctcctgctcctgaaaaagagagaggcaactctttagacagacccctcttgtgcccctgctgtgttcagagagctttgcatcacagcatttgaaaggtctgaccctcctagggagtcagattcacaacaaagctccacttctgacagagataaaactgggcctgtagtcaagatacctgggatctcacccccacttgattggaggcctcgggtagatcaggaccccattctgggcctctgtttccccatctagaaaatggctccagcactctaggattctaagaaacctgggacatcctgctgtaggggaatgaagggaccctatatcacacctggcaaaaccggtcagtgcttcaacagacagaggcattggggctgatagaataacacagacacagagagaaggtgctgagagaatgactcagcagccagaggggtggagagtggactccatgagcagagacaacaaggaaagccctctcccttccctgtgtctggggcctgcttcctgttcctacgcacatggcatgtgccagtgccacccagctaaccaggtttggtgtgggtcatgagtgcctctggtcgtttctcagacagcagcagccagagacaaagtaggaagggtggggagtgcacgggcacctgaaggaaggcagtggggagaaataaacattgattgagcatctgctctgtggcttgctctgagcaaagtgccagaactgagccctgctcagagcagttaaataacctggctgagattgaagcccacgcctgctaggcccccaaaaactgtgctttttctgcagccatgaggacttttaaagagagagagaaacctccaaaaaggagagaagaggcaccttgcaagcacactttgcctactgtacatgtccccagccatcatcctccatgaagaaaggctgggtaggtggaattgcttggtctgcaaaagagaatctgggaagtattttcagggaagcactcaatttctgtttgcaggtgcttgaagggtttacatcagggaggcaaaaaaaaaagtgtcacctagttccacaaaatagaggcaatggactcagaccagcaagagaaacttggagcagtttcaaggaaggattacctgcgtgtcaaagaactggtacaggcttgagttcacccttgaaagttacctaagtaaaagagatcttttactcttggtactttttcaaaagatcaaaatcctctggaaaggtgctaacttgtgtggacacagaggattgagccaaatgacatgttggaggctcctacaatcttgggcatctactctcagtgtgtaggcaccacacatattcgcaggcacacacacactcaaaagcttgaacatccatgtttttcctggatgaggctctgcagcccacctgcagctcggcttgccagtccccaccctcaaatccctctgcatggactgccagggaggggccctctgtaggctgatgggcagggtgtccccacagacaggcaggaagccagagcagacatcactatctcctcatcgctccaggcagccacctccaagccctcctgcctttcaggaagccaaatcaggaaattaactgggagccaagacgcctccagacacctgcctggaaattcaaaccaggagcaggtgggggctggcttgggaggaggacagagtggataagggggctccttgtagtggggcagtgggcccatacagggagtatgtgccaaccctttttaagggagccggtgtcacagataaccaacatgagctgcctgggatgggaccgtgaaggacacaaccagcttattctggggagtatactccacccaatagcaggaggaccctgcgccgggaagccctggcagcaacttggtgattggttctgctgctgctctacgtgaaatcccccaggggatgcagacagaggggacagaatcaggagctgaaaagaggctgcactatacctctataccaaggcaagcacaggctttagagccagacaaaagtggttcaaacccaccttttgtcacttacaagtcccgtaactttatatctcagttaccgtcaattaaatggacataatcatagcaacctgcatttgtcaaggtaggccaactgttccaacaaaaaatcctaaaaatctcagtagtttaacattataacaccatatttcttcttcttacagtctaatatggagttggcagcagggctaactccacctctagacccaggtttctcagtctcagtactgttgacatctgctggataattattgtgggggctgtcctgtgcatggtaggatgcttagtggcatccctggcctctacccactagacaccagtagcactcccccaagttgtgacaaccgaaaatgtctctagatgttgccaaatgttgccccataggcaaaatcgcccccggctgagaatcattgctctagatcctttgagggatcctctgcagctagtcagcagaggaaggaggaaagggtgcacaagcctcacacaggaggtctctgaggggccagcctgcatgccacagcgtgcattgcatctgcccatttttcactggccagatctaggtcacatggcccgagctgcagggaggctggcaagtgtagtccactgtgtgtctggaagaaaaaggaacctgggtctggagagcacatagtcacgtctctgccccaccacctctcagggttgtcaggatgatttgaccagctgaggagtcttggtaaataaaatgcatgcatgccatagctctcagcacatctaatgactgatattctttgaatgtttgtcatggctccatactctgatagcacttgggatgcattatctcgctggatctccatttgttggtgaggaaattaaggtgcgggggtgggaaggatcacagagttgggtgcagggtcacagagctgccggctccaggatgctggctccagcacctgcatcttgacctctgtgctatactctgctgattgttgctctcctggcccaaatcccacgtttatgctgtcacatgcagcatggtcactccgcaaatcatagacttacaaaacatttatctgcatagaggaggaaactctgagggccaggaagaagtgattgcccagggtcgctccactagaaagtgtcagagccagaactagaacccagatctagtggttgaagacaaagtactctctctgagaaagaggccacttctgtcctccagccaggaggtagggatactggcagaaatctctgttctgtgctctcccatccctgtgtaactgggtcttcagacacaagtgagagatggctccagaaggcagggagctaattttcccagacgaccacactggggaggagtatgaaatacaagtggatagccctgtcccccttgggtgcttggggaggggacgggagccttggaagggaatcaggtggctcagcttggagctctggcttcgccactcatttactgggtggccctgagcaattcttttcctctctgagctccagatttctcttctggcatggcatctcaggtgtaacaagcacttctcaatcatattcctgtctgtggtcccatttaaccccctaccccacaggctgtgtggaaggtgggaatgtggcctccattctgtacagcaccctgaccacacagccaggaagaggcagagttagggctcaaaccccgtcttgtctagtaccagactcagggcttcccttcaggggtcccccattccagcgttctagaattctgccattctgtggcccaagtcacccccagccaagatcaccaacacttggccctcaccccatggaaagtctttgaggaaagaggccccctctgttcctgggaaaggtttcacaaacttggggcactggaggcaaaagacattgaccttgctgtcatgagggagtcctcctctactctttctccttcacctccatgacccatcggaccccaagctgcgtggcccagtttggaaggagacaaaggtgtggttaaaggcatcctctagcgaggtggcaggctgaaggcctggcccagaggagggtgagaggtggccacacacccctgcctctgctcagcaatgagaacgatgtcatccaacctagcgctcctgtcacaggcctcaacctccctggaccactcccacctcccatgatcccctgctcaatgaacatcatggcttagatggctctgcatcctctccctccctcagtccccactgccacacccttaggtcagtcccttgttctgttagggcctccccactagcccctagacttcactttactccctccaacacttcctccacaatgctgccacaatgatctgacaaacctggccatgtcactctcctgcttgaaaccctccatggctccctgatcctctcagaacaaaacccagacttctcggtcaggcccacaagaccctgttacctcaccaaccctccaacttcacttcagccatgctcttccttgccctcagtgctgcaagaacaccagactactcatggtttcccccaagcatgtcattgtttcaagcctcctgtgactttgcccaagctgtttcccctacctaaactgtgttccttaaaaggttcatagcaaactcctattcatccttcaaaaccctgctcagatagcaccttttctctgaaacctttccttaccacttccttcctccaacagcactaagtataatacttaacatttatttatactttactaattatagtaaaacttaacatttaagtattacttactataatacatttgttaacaactataataatactatacgccaggcattgtcctggaccctgcatatgtctccttaattaaattatccaaatctatgaggcagagtgacagttttaaaaccatcccttccgcgtaaacctgggcaggcttgtgacagcctagaccaataggagtgcagtggaagggatgcaatgtagcatctaaggctgggctataaaaagtcacatggcttccaccatggtctctcgaaatgctcaccctccagacatttcctcccaggatgtgcctcccagaaccagtgcaccacactgggaaaagcccaagccacacagagaggccactcgtgggtgctctcgttggcagtcccagctgagtccagccttggagtcacatgtgagtgagaagtctccagatgattccagccactcacatcccccttaaatatttgagtcctccagctgaggccccccacatcgtggagcagggacaaaccacctgctgcccttcctaaattcctgaccacaggatctgtccaggcatagtaaagtggtcgtttctttacatctctgagtgtgaggtatttgttacccaccgataatagtcacaaagagcttacagttcatcccatttcacagatgcgaaaactgaggcaaggagaggttcaataacgtgcacactgtcctaaagctagggggaggctgagccaagatttaaacataggcaatcaagttccagagccagccctctcctgtgcttctctcatgatgaatatcacatggtgggttgcctgtgtaagtattcatctccaccatcagacccagcttcttgagggcagagactgcggtctctctctattcccagcactagctcagttcctggcatggagctgaggctgaggccaggtttgctgaactgacctgagcatcaaagggaagcctctgcagtggggttgggtgagtggggtcagggccaccagagcggagttgagcctgtttatgtcatgatctcccgacagagctcctccaatgctgccctgctgacccccaggcccttgccccacccaagcctctgactcatcatctgtgtaaattgatgattttctgcccagccagctccttgtgccccgggggcccagctgacagcttcatgaaaaacagttgcagtcagtacctctcagtccagcagagcctgtaggcatgtgtcatagctgaccccaagccccctggccacgacccaacccctgccacccacaacacagagcacagcccagcttagagtcaagcatttgaatctccactggttttgaccatgggtgccccccttcctgggtctggggatcaaagggcaacctcttaagtctgatgcccccaagtggatgaatccaccctcaatggattcactgcagagaagagtgagattaggaccaggagtcagtggagacaggtgtatgcagaccctggatctctgctagggaagtcacccaccccctgacctcttctgggtctgccttccagctccaagaggaaaatctccaaatgattcttctggagttgaactttcaggggctgtgcaggtctcccgggggctgctttatagagaaagagacttatccttcagccccactgtcccctgaaccctgaaaaccccctaaactctcccctcggtgacctcacacaggtcactcaactctcccaagcctcacccttctcataggttggtgtaaggctggacctttgtaaacaccatcagctgagaggtaagacaggcatgcagccaaggccagctcagctgaggcaaagaggaaataagaaggataataaaacagctgacatttgttgacatttctctatatcctagacactcttctaggttctttaccggcatgaatttatgtattcatcccaacaaccctaatcagtaaacacattcatttccattttacagatgaggcaactgagccacagaaagtcaagtcacttggccaagttctctcagctagcaagtgaaagaggcaggagccaaattcaggcagaccagatccgcagtcctgtccacttaacactcacaccaacgtgaagtacccagcacagcatgtggcatgcactctagcaggccaaggaccctcagccccttcccagagacggggagagtggctaggacacatggaccccaggggccatagagggcctcgccccccttcctccagaccctccgtacctgggggtgggtagctgagacccaccctggccctggcattggtgcaggtgaagaggccatctcagcatatcatccttttgtcctttcacttgtatgggaaagggatccaagagttatttactgcagagatttcatcgagatgttctcacccttactgtacatcctttaaaggtgaaataaaaatatctaaaggggaaaaaaagcattttattcagcatcgtaaaagccattggcagacgttcccctggaagggggaaaaacagcataaaattctgcagtgacattgttctggatgaatcttcatagccagcctgagcaggtggaggggtgatgggagctggggctgttaataggggctcctcatggcttcaggtgccactgggtgggttccttgctgcatccccagagcctgccactgggtcagcacagagtgggagcttaataaatacttgttacattcaagagtgaataaaagaatgggctctagagtgaaccccttcccagtggaaggggagggaggcagtgggccagagcatcgtggcactcggggctggaccactgtccctgagacccactcgtggcacatcactgataggtcacactctctctcacattcatgtctttgcacttgtgttcctctgcctgaaggtgttttaacccaggctgcttgcctccacttccctgtccaatatcgactccacatccagcactcccaaccaggaccactaaagggcctcctcctcctccagctcacacccatcctcccctcccctgtgctcctccaggctctctgtgcagcgtagggtacatgcctgtctctgtctccaagagaaagtgtgctcctcaggatggagaccctgctcagtaagtgtttctcagatgaatgaatgaatgatacttgcataagccttgacgctttacaaagcgttttcccacagacggctctaggaactctcaaagcacccacacgacgtggtagccagctttgacatcataagcctcattttacaggtaagaaagcagcgattcagataaggcaagagcattgcctaaaagtgtatgggtagtgtggtctgaatgttcgtgttccccccaaaattcatgttggaattctaacccccaaggtgatggcattagatggtaaggtcttaggcagggtgtgatggctcacgcctgtaatcccagcactttaggaggctgaggtgggcagatcacaaggtcaggagttcaagaccagcctggccagcatggtgaaaccctgtctctgctaaaaataaaaaataagttagccgggcatggtggcacacatctgtaatcccagctactcgggaagctgaggcaggagaattgcctgcaaccaggaggtggagattgcagtgagccgagactgcgccactgcactccagccttggcgacaaagcaagactccgtctcaaaacaaaataaaataaagaaggtaaggccttttaggaggtgatcaggtcatagggccatagccctcatgaatgggattagtgtccttataaaataggccctagagagcttgtctgccccctccactatgtgaggacacagaaagcgccatctatgaactgagaaatgggccctcagcagacatcaaatctgcccgtgccttgatcttggacttctcagcctccaggactataagaaataaacttaaattgtttgtaagtctatgtattttcttacagcagctcgagtggcctaagaaaacaggcatccttgaatctaggtctaatttaaatccttagcttttcttactatgccaagttgaaattcacaagctgtaatttttgctccctacctccccacacacaaatacattcacatgcatatgcagatacatgtgctccggatacacacatacatatatatgcacccacatggatgcatgtacatatcacatgcaggtatgcatgcacacgtacctgcatgcacatgagcagaaatgataggcatgaagagaaaaataggagttgagaagagagggaaggagttccaaaggcctccctcaatgcctaccatccactatcaggctttgcctttgattttctgcttttaattttcacatcatcagttactacatcaaagcaattttactgcaggtgccctggacccagactgtttctagaagccctgattccaaattccccttcccactgggccctcgtcatcaatggcatttcacttctcattaaattccatgtggggagcatggggaagcagaggagacagtagtgaaatcacctctcacttctaactcttgttcacttgtgttcaaatgccgcttaaggatttatgttccaatttctagttaaacacggcagataaaacctcctaccctgcctggactactggggtcttgtggagacgcatgagagaatggatgtgaatggactgtgtaaactcaaaagtgctgtgcgcacatgaggaaggcattctctaactctctgcctcccaatccctcactaagtaactgaaagggatttcattaagaagtaaaagacagagagaacagaaaatgaggcaacccacaacaaaatgttcaaggctgggaagcagatggatgaataataactgatttgggagccccaagaaggctgaaacctaagttagcagtgggggaagcccacgaactagctagttcctagggcaggagcccagaaagtctcacgtactggtgacttcagctgcttctgaaagaggggctacaaattcaggctgaaaacagaagcattgctgggcacaatggtgcacacctgtagtcccagctactcaggaggctgatgggggtggatcgtttgagcccaggagtttgaggccagcttaggcaacatagtgagacctccatctctaaaaaaattaaaaataaaaacagaagcattgattgaaattctacataagaagcagttagatcctctagaaaccaccccactcccccagcacaagagagaagagaagtgaatctgtaggactttaaaatccagaacacaaataagatctggctgagggtaagatgctgaatatcctccagtttctaccatccaatctggagctggggggattcctctctgatgaaacagtacagcctagggacagatggagaggggctgtcccctaatgacatcctccagcctgatcaccttccacccctatccaccacacaccaggcacatgcacaatgagcttccaggcagctggagcatccagcaggaaagatggagaccaaaaacaaccaaaacaaaacaaatggggcaaagggggctcagaagaaacaaaagcaatgcaggaagccgcggaacatttcaaaaccttaaagttacccttggagaaataagagaagatactgcatctatgaaaaaaagacaggaaaaaaggatggatcctatttttttaaaatcaggagacaatgaaaaagaacttatagaattaaaaagagaaaatactccaatggaaggttaatgaataatgttgaggagatctcctacaaattacaacaaaaagaatgaaaaaaaaacaggagaaaattgattagaaattcagaaaatctgtccaggtgatccaacatctaacagaagatccagaaagagaatggaatcagagataaggcaattatcaccgaagtaacttgagaaaatgtcttagtactggaggatgtgagtttccagattagtgggcctcctgacacaaagccacttaattaggaaatttcagaacactgaggatgaagaaaagacattaaagaaaccagaaaggaaagaaaaaaatctggctcaataccaaggatcaggaagctgaatggcattaaacttctcataagcagtctcagaaatgttatctcccatgctccaccagaataaaagcaaaagccaagaaaaaaatgaaggtgtgggatccaggaaacatggtgtccaaacaggagagaagctaaggggtttcgcagggggtgctgaagaaaccccaggattgcagctacgcaggtcagtgcacgagagagtggaaggatggagggctccatgagggatgttttcaagaaaaaaaaaaaaatgaaagaccacatgatgcagttaaaaacagggggagtggatgtgcacatctgatacagcgtttgcagcctccaggctcagaagaagagctctgacatgtcttctaagagacataagatgcaaaatttcctcacctaccaccccctaaccaaaagcagtttgtagcttattgtaaatctcagctggttgctatggaaatgattatacgtatacacagaacaaataccttaggtgctcgcttctttccaaaactgggcaggggaagttactgaagtagtgcttacttgggtaagacgtgggagacattaaattaaggtttagagaagatgtttacttattttttcaggatcctccacatcagagtaaggttacctggtagagctgggagaaggctgtgcaagaagtttaggtgcaaagcttcacttctggtgaaaagagagaggcctggaatttagaatgttaaaagaatttcaaccatgaaattgcaaaaagtcctagactctgagagcaggtgggaaatgagaaattatggagtacaagcctttcactatacagaaagagctgaccaaggtcacacaacaggttagcaagacgagaacctctgccaagtgcttccagaaacttctctgtggaggtttatctctgaggtcttgggataatcaggagagtctgataggagaaaggatttgttaacccttcccctaacctgaggtcttgactcccctgctctcttaattctccaacctcccaagcccacccccaaccacccggtcccagcctgcaaggtaattataatgaagttaaaccaaattacacacgcagggtttattttgtgtttttttctgctgctgctgttgccaattatggtgcaattagactgccttcattagcaaatgagattagaattaacattgttaattactcgttctgttaaaaggggaagcgggggtggtggggagggcactgggtgggtggtggggggagacagtccacatggcagggggaggtttggagcccccaagggctcctaggcccatggaaactgagggaggaaactgatttataaaatgtcaagggacaggtgggtgagatgagatggaatctgccaggtcaggagcagagggctttcctccttattattattattcttactattcttactattatttgttgaggacttggtctgtgcagcactttacatgcattattcacttaaaccttgcaacattatcagaagtaggtattagcatccccacttgacagaagagaaaagtgacactcaggaaagttaagtgactttcccaaagtcacacagtgatagcaagtggcaaaatctaacatttcattcttgagcaccaggacctttggttctcatgggaaagggcagcccacatatacattgtattttatagggtgatagttttatttttttattcttttatttttattttatttttgtttttttgagacagagtcttgctctgtcacccaggctagagtgcagtggctcgatctcggctcactgcaagctctgcctcccgggttcatgccattctcctgcctcagcctcccgagtagctgggactgcaggtgcccgccaccatgcccggctaatttttttgtatttttagtagagacagggtttcactgtgttagccaggatggtcttgatctcctgacctcgtgatccacccgcctcagcctcccaaagtgctgggattacaggcgtgagccactgcgcccagccaggtgatagttttaaatcagctcatttgatactcaaatttgccccatgaggaaaacaaattattagcctcatttttcaggtgaggaagctgagagtttaatcagggttggcaaaccatgacctacagcctgaatccagtctgccctctatttttgtaaataaaattttgttagaacacagctatgccacttatttatgtgttataaataaatatttatgttatttgtgtgttatatcttgctctcaaactaaaacgacagaattaagtagttgcattagtggccgtatggctcatcaaacctatctggccctttgcggaagaagtttgtcaatccctggtttaaatcattgatacaaagtcatacagtgcatgcaaagaggccctgacacttgaacctagtccttttggccccaaaaccggactcttcttgcctagaaggaaagggaacagttccagctaagctcagtttccagtaagctcaaaaatgtctttattacccccaaggaaagaatcacggcagacagacgaatctgaattattttatcctgactttgaaatttgatcaggttgactgtttccacaagcaaacaacagaaagcccaattatgaatggtttttaaaataaggcatttattatttcacataacaggtccagcagtaaggcaattctgaatgtggttaattcagctaggtcctctttattctcctttccttggcatcttatctgcccacctccccaccggccccgtaatcctaatgcggctgccacaactccagacatcacattcccacccagcaacatccaaaggtggcagggtggggcaactacttctggcaagtcagttttttagatctcagaaagcttttcctagcaggcaccacttccccacagcaagcaaaatagaattattacatttgttttagataaatcaggattcattcctggggtagaaagagtcccagactcccctgaaaaatatggctgctagtatctgagttctgataccaagaaagaattggggggtgggttgttgggaaggcaatggacagaaattttagggttgttccagttgttcacatgtagagtctgaggtctagggagcagaaataacccacattccctttttttttttttttttttgagatggagtgtcactcagtcacccaggctggagtgtagtggcgtaatctcagctcactgcaacctccacctcctgggttcaagcgattctcctgcctcagcctcccaagtagctgggactacaggtgcatgtcaccacgcccagctaatttttgtatttttggtagagacaggttttcaccatgttggccagtctggtcttgaactcctggtctccagtgatctgcccgccttggcctaacaaagtgctgggattacaggcatgagccaccgcacctggcccccattccccttttttcaatgccctgtgcttcttctgactgtaggggcaggggagagggaagggaagattcaaagggaagggttaatctccccagcaccatggcctctaatctacccataatataggcacaaatttctcccaaagaccatttggcctttggtcctctttcccgtaactcacctcccagaccagaaaggcaaaggtttcctgggcattttcctttgcagctttgcctccttagtgcttgttatttcaccccagtgttcagtgaactcacagccataagctgtgcaccaaggccccaggtggtgggctagactgcccaggctcccctttctgagaggttctgagatcccctgcccacctgtgccaaaggccagcaccaaagtggcagtggcaatggcctgaacccagccagatggggcacgttccacgatatgaggtccctctcccctccatccttgcccaaactagctgttcatatcctttgcttccagattcccaccagactctctctctcaatctctttctctctcttttcctctctctctctctctctttctctcacatatgcacacatgcacactcacactctcacactcacttcattttagacactgggtacctgggttcatgcacctttaccaggacttccttcctgccacctgggcaggatttgtgaggcagagaggtcactcaggcatttaaagaagattcaaggagaagggtgtcaggcaaggtgggtcccatctgggtgccacctgtcatgcaaggctcaggggcaaatcccacatggccgcatggcctgccttaatgaagaagagttatgggaggtgggctgtacatggggtcagcaagggaaggcctgggtctctttcctctcatccccatgacagtgtgctgtggcctggccatgtgttgatagccagcataggtttgcatttcagacaaggttgctgacaagctcagtcttgaagagatctccatggtgcaagagagaggaggcatgtgcctcctaccttgggtcagttgggcaagttattcttcagtgggagccctgcgttaactacacacaccacacacaggtgcgtgctcacgtacacacacacacacacacacacagttcctgctggccctttgacttgactggctccccggatggcagggaacattaacatttctgcctccagcaagtcctctagtctggaggtttggcccagaggatcctcatttactttccctgtgctgtcccatctccattgctgctgggttttctcagaatgcctctgggtggttttgaaagtattaagcttctccagctgcttctcaggggggtagggagctcttctcttccttcctccttgttctgtctgagttgttaggactcaaaaaaaaaaaaagccttcagatgattaatgaggctcctaagatccaagccctctcttctcctgccaaccctagccatgggtcacttgttcactctcccaacaaagactactcctgtgagatcccagggaatttaccccaaatctgggtaccttgcggatggtgaccccaaagggaaaatccgactcacccctaaggggaaatggccagccccatggattgaatgtaaacatgacagatcccaaagaaaagaaaaagaagaggtttaaatgacctcatgcaaaggcataagaatgacacaaaggacttcggggacttggggggaagagtgggaggggacaaaggataaaagacaacaaatatggtgcagtgtacactgctcaggtgatgggtgtgccaggttctcacaaatctccactaaagaacttactcatgtaaccaaataccacctgtaccccaataacttatggaaaaataaaattaaaaaaaaaaagaaaaaataaatgacctctcccaggtgcctccttagtgccgtggacagcttgcagtctcgtaaatgagctccctctcttcctagttcatatctggagaggccagttcccctggtgaaagggtttatatccttaagtctccagggttggggttggactatgatgcaggaataggattgttggaaagtaattctaggtccccttcttcccacagggtggctgcacttaagcttagcttcctaaagtgctcatcgttctcccagcccatctctgacctgcagcttcccatgggccccaaggaccccgagatgctgggcaaccaacagctggcagtcaaatccagactgcttagattcagtctgtcccctgtaaaaaccgagacaagcctgaggtggagagtcagtatcttcctacaggcatgcaaactcactccagtatccaacacatagcctgggccggaagtcctaggatgatgggacggggagggaccaagccttcccttttactcatccctagctttgtaaaagtcctctttcccaaatggagcctcaccccaaatgccttctggtatttggaattcccaagccctggtgcaggacaggtagccaccctgaagatgttctaccaggcccagcagagagattgagggaaatgaggaaaagtaggagacagatcttgcttgagcacccaaaacatgccagggcttttacatatgggaggcatggggtctgagtgggcaggggtctgacagtttgaggatctgtttcctcaattacacaatggaaagagtaataaaagtgttggaaggctgagatgatggagtttgggagttataaccacagctaaggggtattggaaaggtcccattcagagaggaatcagccctctgtatacctggagagaagtaagggagcccgaaatggtgcattggagccaaatcccagagggttttgaataccagatcagggactccttatctgatagaaaatagggagccattgaaggtttctgagcaagggagtgacctgttagagccatgaccctagcagagaaacaaaagatgggaaagttggaaacatccaaaaataaaaataaaagccaagactaaatgaagtttgttatttgccatcttactggagaaacaatgccagttccaggcaaatgaatttaaatgactaaagacattccaaggcgtgagcggagtcagagctggggccggatgatgtggtgtctcccgaccactggcaaatccatctcccataggttgcccgaataaaatgtcagctccgggccagatcccatccacctgacattcctgttaataacaaagcctaattagcatggcttttaagcatccattacattaatttaatgcgaaaatctaatggagctttattggaatttttctcggcaaaattaaccttgcgggtttcttacacatgttttcattaggggctgtgagcagtggagatactcagagaattagaatgagcccttgtggttttcgctgtaatccagttcctctgtctctaagccccccagtctgtaggtctttgtttagcaaagctcctgtgcccacaccacacggttctcataaagaccattgccgtaatgagagattcaagctcgaggcttgagcgggtgcctgtctgattcaaacacaccccatctcagcccaaaagatgcaattctgggaccctgaagaatttcaggacgccaggacacggttctcataaagaccattgccgtaatgagagattcaagctcgaggcttgagcgggtgcctgtctgattcaaacacaccccatctcagcccaaaagatgcaattctgggaccctgaagaatttcaggacgccaggacaggatccctagacattcaccatcagggggtttgacccaaacctgtaattcactccccttctggctatcttccagatgggagtggccacatcattcattcagaactacaagcaataggaagaagcctctaaggagggcatccttccttcaattaaaaaaaaaactaaactaactggaagaatgatctctgcccattcatcctttcttcttctccatgtgtggaacatggatgtaagacatggagcagtagcagccatcttatgccacgaggataaaagccccaggttaagggtggcagaaaggaaacccaggaagactctgagccccagatgcacccttgagctgctaaggtaccaatactcatcagtatatgcctggctgcctgttgcgtgaaacaaattttacttgcttaagcctctgttagtgagtttactgttacttttgcagccaaaaacaatcctaattgatctacctggattctggtcctagattctctatgacttttgacaagtccctgatgctctgtttatcagtttcttcaccttctaattagaaggatggaatagagcatgtttttaaaaatctttttttaggcaataaaccctaacaaccccacccccaatgaatttgtgtcccatgagaagttaataaaacttaatccagggttgaggtggtggcaggtggtgggagttctggagttctggagttcttcctactggattcggcccaaccccacaccagagaagccataaagacatctctgagaaccccactgctccaaagggcacagtttatgaaaccaccatcctgaagacctctaaggcccttttgatatcatgaggttctgcctcctgtggctggaatctaggagccaatgtgctagaaagagttctacagttctcaacctttaatatgctctcgaatctcccaggggtcctgataaaatgcagatcctgattggagtctgggttggagcctgattttcagtaagctcccaggtgatgcctacactcctggtccatggatcacactttgagtaccaactataatgttgtctctgtcatcattgtcatcacctccggccaggccactgctcttgccccatagcacatccccaaacaagtgaacagcctgcagcagggaggggagcatggtttcagagatggatagatggatttaaaagctgactccatcacttcactgtgtgatttggacaagtttctcagcctctctgagcttcagtttctttagaaatggtgaatacgggccagtcgtggtggctcatgcctgtaatcccagcactttgggaggccgaggcgggtgggtcacgaggtcaggagattgaaaccatcctggctaacacggtgaaaccccatctctactaaatatacaaaaaaattagccgggcatagtggcgggcacctgtagtcccagctactcgggaggctgaggcaggagaacggcgtgaacccagggggcggagcttgcagtgagcagagatcgcgccactgcactccagcccagcgacagagtgagactctgtctcaaaaaaaaaaaaaatggtgaatatgagggtcacactgcacagttccaggcatatcatggatcctacaaacctgagtctcactctaaagccaggcaggggctgcagttgaggcccagcatgaccttcctggagaactcagtcatccttttggaacaaggcaacttggcaagacaaagccagggctgacattggtcggcagcggggcatagaaagcaggtagtaggagaggaagtggaacagggaggtagaaattggggtgagtatgtcaacattttgacaattcaaagaaagtgcaaattataatcaaatggcatttctctctaatgagactgtgatcagataaagacacctctccgtgaggacgtctctcatctctgcagcttgagaagtgggcctggcccctggcttcctgctgccctcccaaataccagtcctcaagatgggaagaaagtcatcacagaactttagcaaccatccaatccagtcctcttcctcccattttgcaggtggagaaactgagtcccagagatgttaagcaacttgctcaagatcacatagcaagttggtggccctccgggcagcaccccaggtctcctgtccatgactctatatcaaatggcaatagagagtagaaggagcactaaaaaatctaagaaggagccgggctgaaggaggaaggaagagcatgacaagatgctgtcactgggccaacttacacaaagctcttttgttaggctaagcagccaagacaggaaataagggtgttggggctcttgctccccaattagcgtcagtgttttgcttttacccagtcccctgcaggtggcaagtctggcttcccttggggcccctgctcctcgccagctccttgagggttttggcaaggctaacaactgcagggcttggggatgggggtgggaccccacctgccacctctgcctgcctgcatggtgtagggaaaaacacctaggctttgacatcacctaagcccagcttccaaagccctctctgccacatactggcttgtgtgactctggtcttcaggctccctggccataaagtggaaacagaaatggtaccacaccaggaacattcacccctcctccaaggtactatgtgcctgacacaacaggccctcaacatatgtggcttcctgcctgcttccctgccatctgatgttacagacgcagaccctgccctcggagcgtttctagtctaatggggagagaaatttagtctttgaataattcagaagccacttactcttggggacctgggctgatatcttcctagctctagctgatttcttttctttttcttaaactgagattcagctttacttaagccaagatcaaaatgtgtttgcctttctcagctcacaatggaggacaattgaggggagaggaatggccaaaattgaagacttagaaattactaagtgaaactggccaggagtgggctcactcctgccaccccatggggcagtgtaggcagtggaagagcctagaagaggagtggaggaggccaccctgcaggatatcagagcctccctgggcctcactgaccaagggctatacagctgatcatcggcccaggccagagagaaggagggtcctcccaccctgctgtgagcacaagggccatccctagcaaggtgggagaagaagctgagggtccaatcagtagctccatgcctcctcgtcccttcctggggtggcctgtttctgtgtcctgcagagtgaggctgggggctgggagctcaccctcctcttcacatgcactactccgattgcagccaaacttcaagggtctctcaggcctccaggcccacggaggctgggtcattctgcactagctttctgagcacttcctgctctgtcattcctcccctgagcacaataggcttagagggttgggtccacgttttctcttctcttatgtatgccccctcccctaaccttcctctcttccgtatacacacactccaccaggtaagtgtggggtctggccattccacactgacagcttcccttcctctccactctccctcctgacaccctggcacccaccctgccttttgccgggagacgggagtgtctaagtcacagtggcccaagacccatctagaacaaccacagttgggcatctcctgggcatacccaacagggagaacaaaagagccctgcaggggagtcagaagacctggttctcgccccagtattactgccaccaacttgctgtgtgaccttgaccccttgctggccctctctgagccttatctgtaaaatgtaaggattacatgagatggtcctaaggtccttctttgctccaacatcctgagtccctcaccaccaagggaagctgaaaaggagagaagagagctggcccagactgacccccgggcattggccacgcagtgtgtggggtaatgttggggaggtgagcagagctgatataggcctctgcctctgctccaagccatccaggaaagacatggtcatgggggtaagaaagcaaagcctcaccctggtttaattgcacagttaattggaaatataggccaaggttaacttaaaggaaagaatggtgcttatttgggtggttatgcaaatttattgctgcaaagacttccagggaaactgattatctgactatgtgaagaaacaagattaagaatgaaaagggggaagactctatgttctgcaattctcaggaccacccccttagaaactggatcctccatccctctcctagccccacagagcagaacaagttcttcccacagcacagagatggcaaacagaggcctgaagagcatgggcacacagccggttagtggcacagccatttgagacctgccctgtcccagtgacctaggaagccctgccctccttctccaaggagacaactttatctcaccgtcctgctacgggaggtgaggaggacttctgtctgctcttccttggaaggaggggtgtggtgtccagcctccaagacagcctggctgatcctcatctcctgatattcatgcccttgtgtggttctctcccacaatgtgtaaccaaggggttatcgcaaaatgacagtgggtgacatccaaggccagatcattgcacttccaccttgttctctcttactggctcgggaaagccagccgccatgttgtgaggacactcaagcagctgtagagaggtccaagtggtgaaggactgaggtcttctgaccatagcaccaccttgccaggcattgagtgagccatcttgcaatggaatgaatatcttagggcagattctccagcctaaatcaagccctcagacaactgcagccctgggccagcatcttgactgtaacttcagaagaaaccccaagctaggctgttcccaaatttctaacccaaagaaactatgagagacaataagtatttgttgttttttaagccacttagttctggggtaatctgttatgcatcaataggcaactgatgcaaggtggtgttttaaaatgtgcatttcattatttttcaggtgtggtgaggctaacagattaggagtggctaccattgaaaagatggtttgttaccgttcccaaggggagggggtatgccaagccatgcaggggccacatgggaagccagggctgttcggcaggcagagggagcaagatgaaaacatgggcaaatgcctttattgtggtctttacaggaagggtgggtgaggcagggtaagcaggctcaggattggctggtttgcattatttcagcgagttctgagatgtaggggccatctctagttggggtgattagggcagaggaatatcagcataagagcatgataaagaaggtggttggggtagggactctctatgagttggtttgcataggaaatgcaccctctaggaattggctggcaatgggagaggcagtctctccaaggtcagccaggccccagaccacaaagcatcagaaacacagaaaataaaaagggagaataggccagagcagtagggaccctccttcccacagcttggcttcctcttcttgggagtccatgacttcaagaagctcaagggactgggatggggaggttgggggcaggagaagtggggtgggaggctgggttcttatggccggctccagagagacagcagcagccctggacatggggtgatctccattccactagctcctcctcagccaccttctaggtcctgtggcctgaagatcaagtccatacatcctagtatagcacacgaggctcacccatagcctgtctggggcctgcctctgtggtctcatccctctcccaccaaggattccagccccagccctcaaccctgccccagcccatgacccctcctgtcttcttcaatgggcctctcatattccctgaacaagacaagccctcctggctctccccagctctacatatgttattccctcagcctggcatgtgctcctcccctgtcacttggcaaattcctgattgaaacctcagcttgcaggcagtccctccaggaagtccctatggccccaggtaggctaggtccctccacctcagcacccacagcacttggcgatgtatggcttcacctcctgcgtctctccctgtggaatccgagttcctgacaggagggaccgtgtcttactcatccttgggtcttcatcaaccttgggcctttatcatccttgggcctttctcacatggcactggacctgatattcagtctggcattcccagtaaagaactttgttaaatgaatgaatgaatacataagcaaatggggccttgagcaattcactcctgctctctggggctcagtgattcacctctaaaatcagaatcatcatcaacatcatcatgatcaccatcccttccctgctcacctcacagcctgtcatagcaatgcagtgagacaaagaaggtacgtgagctatgtaaactgtgaagtgtggtgcacccatgaggggggctttccttaactctcctgggacctagcatcactgcactctgcatggctgctctctcccctagcccaggtttcagggaacttcctaggaccttctgggaagaaggcagaaaattgcctcctccggttctccctccctccctgttcttggagcaagtctgcttctgccccttcccagcttcctcaacagcaagtggagatccctgcagccacagtctcccctctcctttcattcttcccctctctcttttcaacaagcaaacttgagaaatggtaaccattttccccattattcaaatgcatggaaattacctacttggcattcctctttgacatggagcctttaattagccactggctccccagtccccgggtgtttctctggctctgcagctccctggcttcctcactcccctccctccattagcatcctaatcagagatgcccaggttccagggaagacagagaagcgacggtagtttccagaaatagctcatccatggctggagatggagagctgggtttgggtctctgttcctgtcaccaactcctcagtgaccttagacttgtgtggggtcacctacaagttggggtcagagctggactcagatcagggctttggccccattccagatctctaccctcaattccacgaagaatcattgcctccacttcaaagacacctctcccggaccccatcatcttggctcctgcccttcctctgcccccaccctcttctgagagtttaactccattgctcccttggccatggctttgcagttcccaaaccctagtgcctccagggatgtgggagtggaacccaatgggcagggtcagctctcagcctggaaggcctcaggcggtgccttgtggatgcccagttcaaatcaaccaggcttgactagtcagtgcctggtcccagcaggtcatccctgtggggtggatgagaagtggccagtgcccgctgtcatgagcctacaggagtatgagcagctatcctggctctcaacgaactggcaaactgattgagaggtctagactgtcacataaaatgccaccaagcatcagagaggaggcccagatgctggccaagccacgctacctcttgggtgtgtttgctaagatcacactagctgctacacagataaaccctgaaatcccagggccttcattcagtgcaagcatgtgccttgaccacatagagtccaaaattgcactgggatgggaggaagagagggtgccatttacagacccaggctgcaagaggctctgccatcttcaacatgcagcttcccagatggcccagggcacaacgttcagcaggcagacagcagaagagaggatggagaagatacagccatgccctaactcttggccagagtaataatacaacatcctatcagctcacgttctattggtgagaaccagactgggaaaagtccagtccctttggggcagccgcttcccaacagtaactctataccacggaaggggagcacagtcatttgtctctgccaccataagcctcagttttattgtctgtaaaacgagggcagggtggactggactgaatatcaggactggaaggaaccacagagttcatgcagtccaacctgccatcctcccccctattctacttgggaacaaaccaaggtctgaaaagttaaatgtctcaccccgtgatcacaatggcacacccaaaattctagatcttttgactctcagccagcgataaaaataagagctaccactcatggagcaccggcctcacacaggccctttatgtatactgtctccaactgtctcaacaatggtgtggagtaggtatcactgtccctattttacaaatgaggaaactaaggttcagagagagcaacttgcttaagggcgctggaccagcaggaaggtagcaaggccaggagctgaccctgtcccacaccgcctcccccttcactacaccattttcttctcaaacagctaattctgaactcccctttgtgaaggaactgagaccccagcccttcccatgttctgtccccttggagctgaaatctccctgctgcccagtcacccctcccgactgcacaggtccagccagcagaggtccagagaggctgagccccagcaaggaaggggccacacgtgagatgaaaatgaaatcttaagctcccaaccaattgaatgaagccctcttggccaagaagattccagaaaaacctcaaaacctaagttttccagtaatgacaagacaggtcaatcctgcttctttataccctgtcccttgctaaccactagtagacttttcttttctaaaaattaaacagaaaccagccctggaaacaaagaacggaagactcagtccttcactgacttcaaccaactgcctggcaccactccctttccctctcaccagcattccttccctataagtgactaccaaccccaagctgggtctggcagttcacagaagctatgcccagggtgcctctgtgtcctccttgtgccttttgacatatatagcttaattttactacattttaatgttgtctccaccccacagtaaacaaatagaggatgtatgtaacatatatgtttgctttccacacgagtgtgacttcccctcatgaatattcgtatcttcctcctataacctattaaatatgtatgtctagctaatctaccaagcagaaaactcctgtaacatcttccctccctctaagtgcctgctttccgtccctatgggaggctatgcttcccagcctgcaggttgcaatcctttacaagaaataaagttctcctttccaaatttatagattttgtgattgtaagttggcatatataaatcagaattgggcttagctgtcacattccagatgagagcccagggttgtcagggtgccttcggtgtcagggactcagctccacccattttgttgctccatagcctcttccctaacctcacctcgtggcccactctggctggtgcagtgctaatcattacatctgcattgcagccagcagggaggaaaaagcagaagagaaggtcctctcctccctttaatgacacttcctggaagttgcagagaccatttctggtttcattccattctccggaatctggtcatatggccacacctagttgtgaggaaagctggaaaaggtagtctttattcagaatgaaaataccccttttcagccgagggggcctatacaggtaccttaacctgcctgagccttgatttcctcaccagtaagactgagtcatcataactgcctcatggggttggggtaaatattggattcaatgatatcacacacatcaaagttctggcacatagtgggtgctcagttaatcttagtttctcttccctgcccctatgccctacctagagtgaagcccagtgaactggtaagtgcaggccatggccatatcctcaggcagtcagttatctagggcccatatattcacaagcaggtagcacaaaagcacacaaaggaacatgaaaatgacttccaactacccctcccacaccaacccagggtttatacacttctaggaaagctcctctccttattttgcgcttcaaggccatcatcccatcttactccttgctcacctagaaacatggtagggtgggtgtggttaggggccaccatgcctgtatcctcagccccatacaccacccctccatcacagtataatggtgccatccaccccctggagttgatcagaattccatccctccacttcccaacactgtcccagaccctacatcctatgggttaaggaagaattggggtgagaaggagggaggccctgtcaaggtgtattggtgggagagcttttggcctatcatgatgaagactgagggtgctctgaaggccctttaaaatgttaagacatttctgcccctctctggagagagcatccaggagacaagctctggtcctgcttgtgtcactactgcagagaggccaaggcctcaacgcctcatctgcaacacaggaccctccctgtccctccaacctgaccattcagtgatgcaagtgaggacaccagcggccacatcccctgcctttaagcacccagcctccctgtcacgaagccccccactctgtgtgctgtgggcagggttggaggctcacccgtggtagagcctcctggctgggctgccctgcttcctctccgggcttcctgctttgtggtagccccctcactacacgctgtccccaagactaccctcccagcctcgttttgatctcgggaggacaaataaaccttaaattgaatcccctttttgtgaagttacccagaattggttttcattgctgaaagacaaataccccaaccaatacataagtcattcccgccccctggacacagacatcccctttctttaatgtgggctcttgccctgctgcccatccttggctttttccttgcccctgcccccgtttttcattatcagctaattccctctggtccctcttttaaggaagaaaaaggagggggtaaattcgggatgaacaaaactattcagatgtataaccttcaaggtagctcccatccctgcacccccacaacaacaacaacaacaacaaactcatagccaaccaaactgcattgctttgaattagattgtgtttgttgagtggcccttcctggagctgagtgccaggcactgtgctaggcacatgggatgccaatgaataaagacgagccttccctggagcagctcacagtctagccttcccaaactcatcaaaatcaaagccactcggcagtaatagcgtccccatgttttatgagattttgcattatgtgaatctgacactatgatataaagatattaataaagtctcactttatattcaaaatttgaaataatatgtatcccaaacatttgcttttaagcatgaagaatgttgaagctggcaggccagtgaattgtaaacttactgtctgcatgcttaccgcacagcaatgccactttaactgataaacagaaacacctaccaacctttgtcaggatttgttctaaattatgcaagtttctaaattacacaagaccttctggagcatgtgtctcagacatgatgcaacgggtctggtgttcggagttctggctctggaatcagagtgctgggatttcactcctgactccatccaccgtgatcttgggcaaggcatggagcctttctgtgcctcagtttccacatatctatgatcaagataatggtgctgatctctagggggcttttgaagattaaatgagttcttccatgcaatctgctcagaacagcacctgcagcactgcagcaagcgggggcttgcagcatctcgctgagctgtgggtcggcaggaaggggacatctgctcatgcactgtggggaacctaaaccgccatccagagctggagcacgtacagcattgctttgcatgtccctggaccctgaggcctagtcagtcgcacagctgctggagaccctcttcacaaaggcaggcctcctcctactccagcgacggcattgcccttccacgtgcgagggcatcaaccagacacttgaccctgacggtctctgtgctctcatttcagagaatgttcatagacgctccagactcttaaagctgacccagccacatcttcatccagagtagaaaacagagttggtgcctcggtgtcgccaaacaaagcccctgctcaccaccccagtgttccagaagcctatctctccaaaatgctccatcacaattcacttttttaagagccaatctaatatgatagataccaccctggagcttaccctgggaaagcacaaagggaagcccacttaacgcagcttgggggtctggggaggatttcccagagggagaaggagtcactgcacttcacttcccaaagagcaccaaggagccaggtgatagggggagaggtggggagggcagctgacccagcatggggaatagggggaggggcggggagggcagctgacccaacatggggaatagggggaggggcggggagggcagctgacccagcatggggaatagcttgcacaaaggtgtggaaaagagagaacttggcacattccaggaattgccagtagctccatatagagtggaaagagtgtgaaccaagatctaactgactcactgccaaataacatggtttctggggcacatgagtgaggcccagagataccctctaggaggtattcatcatcttctttgcactgtggctgtctttggtgagcacacaggatccttctcagaattatgcctttaaaagcataaaataaaatatataggatcaaagtatcatcaaaatactttttaaatgcaatctgtagtaacatatgtgcctttttatcaatgtattatatgacaagatcttgtggtaggaagtaattgatgagcaaaaattatttttcaaagtattaaaacatctgtaatatagtatgaaaacatctatgattcctattagtgacaaatccaaggtgtggctaattctgccatggtttgttacctgctttcataatgaaaggaaatgctcaatttcagttaaagtttagtgaaaaggaagatgcaactttttcccatccaaggtcatggaccctctgacttttcccacactctcctgctttacacaaagacccagctttgtgcctacagcccagtggttaagagcatccaagccagacctgtttgctcagttactgctgcagtacttggggcaagacactcagccttccagtgcctctgtttcttcataactgtgaagaccaaatgagttaatacacacaaagcagttagaataatgcctgccacatagtaggtgctcactaaagaaggacaagctgttttctttcttattctcagccccaaatacaatggagagagaagcccacagatgtggggcattatttactaaccagagtcgtgctaataagctcacaaagcacaattagcagtcatttcaattctgaggtttgcttgactataaaagcttcacatttcttcctccctgatttctctgctaattacaactgccgccgtccatcgcagctgccacacaacatgggtgctgactgcctctaacgtagttgttaaggcggcataatggggcacaatgactaattggccatcatgcccaggatgaatgcgtcagacaacagcggctggccagttcctggccttgggaccccgagctgcacagccccagcactctcccagtgcacccctcctccaccttcccaagctgcctgatgggaccagccaatgaaagggtgcagggacaggtgtgcagaactgggaggctctgggggccctccctgaggccagccctgcccctaacttgctgtgtgaccatgagttagccactgagtgtctctgggctgcactttaatcatctataaaatggaggtaggaggaagtaggtctagatgcttcctacggtccttccagctcccacttactctactttgattattccatgggaggttccccttcaagtgcctgcacagccactccccagccactagggcatctccacctgcctgagggtaagaaagggcaggtggagttcagcagaaacagccatgctcaccaaatattccatctggaaccccacacttcccagccaccttgcagttagctgaggtcacgtgacagctctgaccaatgggctgtgggcagaagcaacaagcaccatttccgggctgaagcatggagaagcagagaagcatgtgatctccccgcagtctcttccggtcttgcgacccagaaggccttgtggtgacatggtggaactgagctgagctggaagcagcccaggttgccaaattgtcacttggaagacacccctggcaacctttgtagaggtacgaaaagaaccttatgccattaacattttcaggctattgtcaccatggcataacctgacctatcttgtctaaatagctattttcccaaaaggactcaaataatgggtgttttatataaaggatttaggaggcaactgcttcatagtgcaactaagtaaagagatccattagagcaaaagaatgtgaactttctaacaatgaggcaggatcaacaatgaaatgagcagtcatcccaaggccccctcactgtactccccataactcttcaagtgagaagcttaaaaccaagtttaatgaaccagatatatataagaagtccgaagggctggtgaccaaggtagagaatgagatacggggtgttctctggcacccaggggggaattttcgcctggtggtgaaaatgggtccagtgaaagaagattcatggggtaaatttcaggattgagaaggaaatgtttgggggtgggttttactctaggattccatctatcaagaggatgttaatgaagaattgagctcaatttggtttttctctttcccagcagcaaaatttcacccaaggggatctcccattcctctttcctggaagagactccagggtaagcaaaaaatagatcccatctcacctctacagggtgtgagaatcctacagaactcttggtgcattttgtaaaaccacaaacttcttgagtttggaaagaattctggagtctttcagtcctaagtcacagaccccagcattgattatggagtctacagcagcacagaattccagagtcacagaaatcaaagctccaggacagtcctggaaagaaacaggagagcgtggccacccatctgcccagccaccaaggcctaacccaccagcggggctatattggcttcttcttggggacgcccagtacagcaggccccctggtcctccctccccaggcctgtgtctcacgtccccacagtgggattgcaagcaagctgtccccatgcagcagataaataaataaataaataaagagcatgactttgtgtttgaaggacgaatgccaagtttcctctctggggccctctcgcaaacctccatatatcaccttcacatgaccaggctggcaggcctgccacccccagctctgcttggctgtgataaacatagaagacaatgcattgcctacaccctcaggccctgaaatgagggaaggggtggaaaaatccatcgaagccattctagatttatgtttgaaacattccagatttatgttttcctttgtcaggggagaaaacaagcagatattcctaaaggtgtaccttataagccagcgcacgtgtgaaggggcatcgtgctgtttttggcaaccacgctgagttcagtttttgcaccaggacctggacgtgcacactgacaggccctcatcccatcacctttggcttcgctgcatccttccttgctttgaatcacttcctcgactccttctccaggaatacttcccagattagactcatctatttcccagcccttcacctcaagctctgggactcttctcagcccccaatgagtataggtcattccataattgtttgtttcttttcattccatgagttcctagagaatgttggctgcctttcccgccctcagaccaggaactcccccagggaagggacatgcctcccatcaatccaggtactcctacggacagaatgactgcccttccacactatccttttggtaggttaattcaccctgtattaaaaagaatgtgactataccgtctaaacgggtattccaaacaaggagagacacttgtggagcttgaaagtgcatgcaaaatgcttgtctatacttactgttttttggaaagaggactatcgctttcaagtgattcctaaatagatctgttgagagccaaagtgagaccttaggaagcacccagcactgaaaagactgtggtgctgccctactagcacccacataggtaattcaagacaaaacggcactgagctgtgcaatgccaagcgcccatgatgcctaagttcatcagagctaaacagctcataattttgctaatattcttagtgcatgctaagtccccttagcatataggtgactcctgccctggatttgccatgtagaaaaggtgaaaaagcacagtttctgggggaggttgagagcaaagctggtgactcccaggatggagatggagaacagaacacgtccctcccagcctcggaggtaggcaaacaggcaggatattagtctatatctgccactggaaacctctgtttccccaatcgggggaggagctaaggaggtggagtcatttctatgttttccaaactgggatcagacacagaatgaaactataatatcagctgggctttgctgggcttggaaaccactgagttcttacctccccaaatatccacgcctaccccttccctgccctccctctctgaacccaggaaagcatctgaaatgctccagtgaagaaaggacttgaagaccctcatgaaatcctccactgtcttcaaaaagccatcagccctgaatctggtcatcctcatacaccccaaacccactctgccatggccaaaccaaacactctacgcacagccctggaagccaaatcacccaagccaaaggatcaaggtgaaggctgagaccctgcttctcaactctctcaggactcagagaccatcaggagatgcacagtggatgttggataatgtctggggctccagattaggaattgggaaaaccagttccagtttctggctcagccactgctgtgctactagaaattctatcaactgaaaattacaatagcacttgacccccacaccctgccaacaaccccaaccccaggagagcctcagaactgaggccagcctctgaacagcagcaccaatggagggttcagaaaaggatgaatggcaaagtgagaaaggggagctgaagagaataaaaacacaacctaagcctggaagtggggctggggcggggcgggcaacagggcaattgccaacaggtaggaggtggagaggaggtcgtcctgcatacatgggggatggggaaggtaatctctatcctgtacccccagcaccctgagaattaaaaccacaatcctgacccatgcacacaacagaacactgcggggccataaactacaatgttgggaggatatttattgacgtggaaaaatgcttacatatatttcaagtgaaaaggcaggttgcaaaataatatgtacagtatgatgccattcttgtaaggggaaaaatatctttatacaagtctggaaatatatacacccaaaattccaacagtgcttatctccaggtggtagattgtgcatttttatcatctttacacttacctatattttctaattcttttataataataggcattatctgtgtaattggttaaggctttcttaaaataagtaaatacatcaataatttttgcagggtagtatgggcaggaaaagaacagccagccacctggatccagggggtggggaaaatgggaggtgggaggaaggactcacctaggaggggggtgggggaggacggagggtgggaggattcacccaggatgggggttaggggagggtagagggtgagaggactcagccaggaggggttggagaggatggagggtgggaggactcacctaggaggagggtggggaggatggaggatgggaggactcacccaggaggggttggagaggatggagagtgggaggattcacctaggaagggggtgcggaggatggagggtggaaggactcaggatgggggtgcggaggatggagggtggaaggactcacttaggatgggggtggggaggatggagggtgggaggacttacccaagatggggtggggggaggatggaggatgggaggactctcttaggatgggagtagaggaggatggagagtggaagggctcacccaggagaaggtggggggaggatggaaggtggaaggactcacttaggatgggtggaggggaggatggaaggtgaaaggactcacttaagatggaggtagggaaggatggaggataggaggactcacttaggaggggggtggggaggaacgagggtggaaggactcacccaggagaaggtggatggagggtggaaggactcacttaggatggaggtgggagaggatgcagggtgggaggactcacccaggatggaggtaaagtaggaaggaagaagatgcctccctaataggacaaaggcctcgttacaaagactagattgtgaggccctgcctcttccaacttctttcccttcccaaatctccacagagcccagaggtcctcccactcctcagaggagagaagtctagtctggaagcccacagctgccccatatagggcagaggcaagggatgcagcagcaggaaatcccaaggagagatgcgggcttgtcaggctaagcctggcgcatgtgagacgaaggcaggcatctgagacagtagtgagcttggggaggctcctgaggagggatatcccataacgacccctccagggcaggcaggtggcccagggtgacaggagaggcagcttggagggccctgagaagcaaatgacccagcagttaatccaggccccattggttggcaactttagggctggctgggccgggagctctgtggagctcttggcctggtgggaagaggcaggcagggaaggtgaatagcacttcccagccttctccgatggcaagataggaaaggctgagcagaccccggtggtcactgcctgtgtcacttgggtgtttgttattctctttgttcctgtctatttcccctctgtcattagcagttgaaacccttaaaatggccaggagccttcttgactggataataatcagagctcctaaaacatccatggactgcctttataggtggtgagcttcctgtccccggagatattcacacagaaactgggccactatcctggtcagctctcaagggttattgagtcagaaagagagtcacacctctgaggtccatcccattcctgagatcctctgagtccatgagagtgcgttttaggggcaatggctgggaagaaggcacctggcctaaaaattgaaattggtgaaggcaggcattccccatcctgtccccagtcctcatagaccagcatttgaaggacaaatgcatctgcctgcaggactggcccagcaaggactctggttctggaagaggtgcctttgccctgtatgaccacctgcttgggcagaagtgggggtttctggtcagccttgctagatatctgtaccaagcaggttacatgcctggtataaagagaagcagaagcatttcagctccaggtcatctggggcagtttacaaggtcacagggttccttacacactgaaatactggacccatcatattcatcttttagcgaacacatcaatgtgagaacacaaaccttccacaagcatccagcagcatgcggaatcagggcaaacatcagtatcatcgtcgttcatagaggggaatcaacaaacataaaaagaaaaaagctatgaaaacttgcattggtcgtgcaaaacctacaattagtagtcaaactggatatttcccatttcccccaaatgcagcctggtaaccactgtatttgttgttaaatggagaggatttctagaaaagcatacttgggcttgctctaagggagagtttcccagtaatgagggctgctggacagtgggacctgttgctcagggacgctgtgcactccctgtacctggaatgctcgagtggagaccagctgtgatggagggccggctgggtctcctccactcccctctcagatccactctgtcttcaccctgttcctgcccaaggaagctgaccagcctggaccccatcacaggccctgactccttctgacttctgtcggtctgaccagtggggagccatggaaggggaccgaagagaagagaggtgaacatttcccaggctgcttctctgcagggcttccttccatagaaggtcacagctcctctctgaccagactgcatcacacagtccctgtgacatctggcttgtggtcatcactctctgctctcaccaatcgctgcctaaggagggtcacagccaggtaatacttgttactaaccccaagggactacactaatctgtgtgctttctctataccctgcccacaccttaataaattgtcactgtactgaaaacccccatggaattatcctaatgtgagtgtgccatctgtttcctgccaagatcctgactaatacacaggatccctaatcagacaaaaaaagtaaacgatacagtctctcttcattgtgcagttaagtcagtagttccaggaaatgtgagtaagattcacttggttgtccgcttcatttcattacggtactaaacttgatgttatcagttgtggcttgtggctcacaacttcccaaaccattgctccctatgcccacttgttctacagatggagaaactgagtcctagaaccttacccaagatcacaagcaaacacagaaggccaggaactccaggacccctccccaggtgccttctccgagcagagcaagccaagggggctccgccacccttccctgtccccctcccacaactgagactgccgcctcttctctccccagtccccttccctccccagtccctggtgggggaggcccttggggaaaatgatgagttttttatagcatttcgtggtaagcacttaataactctccaggctatagatctgtgcctcgcatgggctggggataattcacagtaaaatatgactttccatttatcacactgacgtgtaataaatacttctcagtgaagcttgggctcaaaaggggggtagggtgagcaaccatcagatgaggctctgtgactgagtgttggggttcaggctcacggcaggcacactcagggcctgagcaaacctgagcctgaagctagcagaaccctgggtcaaggggcacttccaatgtaatgtgccaaggctgcccctcagttctccaccagctttgccaccatttctgagaaatcaagtcccccgctcctgcagccaaactccttgaggacagtggggcctgtgtccaaaaagtccaggcaaatttcctcttcctcccgttcccatctggctccctctgactggtctcaaggagcttcctattcccccaacctttccagccccacggacactgtgctaatcatcggacatttgggttgttttcaaactttctgcatatccaataaccacaacagctcctattcattcagcatttgccatgaatcagaaacatttgctcagttaattctcaaaaccacccaaggcattatcgccatccccagctctcaagagggggcactgacactcagtgggttgagtgacttgcctacaatcatattgtggtgatatgatggggtcagactcaaaccaactacaagacagccagatttggattaagactgatgccactgtcttaatgactatgtgtcttaggtcaggctctcccagatacagatcctgagacaggatttgagtacaagaagtttatttatgaggtgactccaggaagcaccagagggagaggagggctatgagacagggaagagaaggaagtcaataaccaggtcagtgaccaggtttctatggaggacaactgaggaactcagggacaggagagagcagacttcagggttatccacacaacaagaaaggaagctggggtacacaacctccagctcctgtcagtcaggagcagagggcatgagatggctgagcaggttccagtagccagaaaggccttagggcaaagagtctcaggttgcaagctggcagttggcaaccatatggtcctcatgcatggagatagggagtgccaaggggacatgggcaaggcactggtagcatctgcctctctgctcggacctcaccagactgctgttgtcacctgcctggaatatgctgtggtctcctagatgagacctgtcttggtcttgccccatgtggtacatcctccagctccaaataggaaacacattccactttagcccacacagcaaagaatagactgggaaagtgccccctccaccaggaaagacaccttactgaagcctgcaggtgcatccctgaccacacaaaggcagagaccaccaggcctagattctctctgaatcctcaccctgggcccaaggagtgtctcatgcacagtaagtactcagtgactcttgctgcatttgaaataaaactccccaggtacactttgtactgaggggagtgcttcttcccaaggagcaccctgctctatggccccaccttgcagggacaagggtgctgagtgttaggtgctggcccaatcccttcagcgtctgagcctgcccctgtgagctcccagggagtggagaaccctcacaacgcagaggacctgagtggtgggcagtcttatctagaagaactggtggaggacagggacaatggcaggagtggcaagagcactgtgctgggggttgggaggccagggtgcttgtcccagccaagccacttgcccacagtgtgaagactcaaggggtctgtttgcaatgagcacttagggatgaggagcatgtcccacatgaagagcactgcacatgggatggagggaagagttttgaccccacagtccaattctgcagttaacttagaagacgtggccacttggtcatggtcccctctacttacaccttcttcattaggaataattacactgtaataattctaagaaaatccatatagtataataacactcaaggcatcctatatgacatgaaggtcccctcctccaagaagccttccccgatatcccctctctaccacttctaatgaagaatggaccatgccctcctcagtagcttgctctgtccactgtatgctgccaccccagcccccagtgtgtggttgcctcccctagttaactgtgagatccctggagactgagtcttaatcttgtcttatcatgtgcacatgcaggcatatgcatgcatacacacacactacccagagctgagcccggagcgtgactcagaatcaggctcactacatgctggtcaaatgcatgtctaagtgattgaattaatgaattgattaataagtggtgtcataatcctgactcgagaaatcctttggaccagcacctacacaaggttgctgaacaaaagcagataaactcagctaagtaaagtcctcagcccagcgactgacccacttgtttctctcttcccccttagtggcctgatgagcacagctacttcctaccatcttgatccaaagaccctgtacagagctgatgctcccctaagcccacgaaagaagagactttgcagggttgggatgaatccctagaagaagaggcacatcctccttcccccaaaactcttgagacaaaggaaatctccactcaccctcctgtagttacctacaccaggggtccccaagccccaggccacagaccagtaccagtctgttgcctgttaggaaccaggtcgcacaccaggaggtgagctgctggcaagagagcaaagagtttttatcaacagccgctccacatggctcgaattactgcctgagctccgcctcttgtcagatgagcggtggcattagattctcataggagtgtggaccctgttgtgaactgtgcatgtgagggatctaggttgcagtctccttatgagaatctaatgcctgatgatctgtcactgtctcccatcacccccagaggggaccatctagttgcaggaaaacaagtgcaggactcccactgattctacactatggtgagttgtgtaattatttcattatctattacaatgtaataataatagaaataaagtgcacaataaatgtaatgggctcgaatcatcctaaaaccatccccacccccaccccagtccatggaaaaattatcttcctcaaaaccagtctctggtgccaaagaggttagggactgcttctctatactctccctccctgcccggcacccaggtcaggaaatggaccaggtgaaccccatcagcaacattattcaactccatgattgagaaattctctcaggtcctgagtgagctccacaactcgccattcttagagggcagggtgtatgtgaacccatttctcagaaggtgaagctgaagctccaagagggacaatagctctccaaaagccactcagcaggtggatgggagagtgggaacctgggttccctaacacagccagataagatgggagcatctacgcccaaatgtgaacagggatttgcctcctgcagccagaggtgctgcccaacccctgcctcccactccagatttgaagcaaagagcaataaacagtttgtggcatttcttgcctgtcggagtgtatttctagcttacagaggatacatgggtttctgaataattaagtacgatgcttggcatctagggcccaagactccaaaaacacaaagaacttgaggcagaaaattcccatcagcaaccaagtcagagagagtccgtgacatttgctcctcccatctgaggaccaggcagacctgggctccacttgggagcaagaaccagtctggaagggccttccaagatgatctgggcccagcacctcatttctaaacaagagaacagagggccagagaggagattcaccaagggtcactgagtctcaagggtgagtctgaagccctggaacaatggcgaaggttccagacattgacccaaataccaaggtggatccactctacttctttccagcagcgttgccatgggcaagtcactttattcccctgaatctcagcttttcccttctgtcaaatgggaacaataaaaccttacacatgttaataaccccatctattctacagatgcgggggggaaaaggatgatgaatgtgaaagttattggtgaattttaggtagatttccaaggtgagaagctaggtcctcttcctctggggcccactatcatgctctcttttctctctcctctgccttcccctcctcttcttccttctcatcttcctctcacccctgctgcctccaagaaaggactgaaggacacgttcaagaagcagcagaaaaacaaggttaaattagaattaaacaaagtgccaactttagaggagcaacagaactccacagagaggcgcagctggtaacacagcctactggggaaaaacacaggattaaaggtcaacagacttaaagttggtcgcatctcaggacagcgaataaacatcatcactagcattgactcactgctaactatgtcccagcaccatgctgagctccttacatactttgtcacattcagtacttacaacaatcctatgaaataaggtaaagtcttcattttatagaatgagaaaactgaggctgagagaggttaagtaacttagcaaagtcacacagctagtaagtggtggagccaggattcaaaccaagaggtctgcctccaagcctgcacgctgaagccctctacctgcctgtctccttagagcattacaggaggtctctctggacctcagggtctccatgcagctcagagacagcagaggggcctgtgtgagtatccaaaggtataatttactagagatggttaaaaaaaacaaaacaaaaaaaaagaaagaaccaaaaaattcctcccatctctgcccctgttgagatacagaaaagggcaaggaaagaagaggaagaaataagttgagtaacttttgttttagcctttcagctgcataaatcatcccggggccagagaactgaaataattcagagggaagatgagcacgcatttatcacgccctgcacatactaagtgtcccctattgaagtccagtctcaccaccggagctaggatacacactgtcccaccaccttcacctttgctctgggaataaggcctccagtccagagggcttctttttcttccccagacccaaaactcgctgatagaccccccagaaaaatggtagttagataggaatttcaggggctaaggcaggactcccctcgactagggactcaagtcacaaaggccaccagaccagcttcccacagcctctattcccaccctccatcctccctctgcgatcactccactctggaggtggggctgcctggaaagacctcaggaagacagagaatccagctctcactcagaggagccaggtgggaatggccttagcaatgtcctcctccaacaaccccattttacacagagacactgagccccaaagcatgcaaagcctatcagaggtcccagggctcattgggagcaaagcccagaggctcctgatcgagtgctctcctctttcactaaccatcccccagcctccagtcatggctatgtcattgtccaccagaccctgcactgtgtatgtgaggctgaggtgctacagggcccaccagatccctgcggctcctccaccctggggctgaactgggaaggtggagagaggcagcctggtgcaaaggaacccatccagagtttccacgccaggcaggcctggcttcaaatcccagcttggccattgtattcattgtccattgctgtgtaatcattattcccaaaatttagcagcttaaaacaatacatctattatctcacagtgtctgagggtcaagaatttgggtgcaacttagctgagtcctctgcaagccatggtttctcacaaggctgcaatcaaggggttggcccaaggtctgcaatcttatttaatggtttgtgtagggaagaatctacttccaagctcattcacatagctgttggcaggattccgtttcttgcaggccgtcgcaatgagggcctccgttcctgaccgcatgggcctccccctcatggcagcttgcttcatcaaagcatgcaagccaagagggcaataaagagcctgctagcaacactgatgtcacaatcttctgtaacctaatcagaaaagggacatcctaccacctttgcgacactgttggttagaatcaagtcactaggtccagcccacactcagagacagggaattactcaagggcatagataccaaggggcaggaattctggggttattgggggactatcttataagtttgccacccacagccatttccagctttgtatccctggccaccttccttaacctcactgagtgtccgtttttccctctgtaaccatggggatgaagacactgtgttcagcatcaggcatgtaaaaggtgctcaagaaatggtggttattatgcttccaagtggtatcagcagcctaggaggctaggatagatgtgctgggctttcgagcagccagacacacacagggagacagaagaacctacacactgtgcagggacggaggatgaggttcatgggcctccccagtctagggggagaaagatttgcttaagaagcagagaatcatttgcttagcgggattccagaggcagtgtcataggtagcatttggggaatagaataagtggggaacttgaagatgctggcccaggaaccctgaaagtgagccacacagagctcccctatacatcacaactgcaggaaaaggcctgggactgcccccctcaggaacagggatttgaagtctcaaggagctggtctccttccacagggatcagctgctgcggagctgagtccagcacacgctagctggctgatcgtgcaggacattcctaggtcagatgtttgcaagccaggtttgcaccaagcactagatgctcacaccaccagccagtgcttggtgaaagatggtacctatggagagcaagaactttcctggaaagctctgcttcaccctgttaaaacaatgatctgattaaaaccatagccagatgctgtaggccatgatccatggagaaggaaaagaacagaatccttgagtatccaagctagtatgaccttagaggactgcagatgggatgtcgaggatctgcgagcctcctgaaattatgtacaaaattacatgtgtgtggctgcacattttccagagggagaaaacctgtccaccacatacaaacagattaggaacaaaaatccaatttggccctcccattttacagaggaagagactgaggcccagggagtaccaaggactctcccaggccatacagttgcctttcaagggagctagagagagaacccgggcctccagactgcaggccagcccattccacctttcttgggcagacttgaagtctacccttcactaataaagcattctcctaataaagcagccatgtctctgaacaatgtttaattattttgcaagagaatgactgtaatgggccacatgaaacttaaaggatttttaataaaatctcacatgctctgagggctccagctccctccatgtgcccccctttgttatttctcctgatcccatgaagatatagcatttgtcactgtttcattaggagccacggtgccccatgttatttatgagtttgctatttattgaaaattgtatttttgagggggataaagggggagctgaagtttatcacaaagaagccttggcaagaaaattagtgacatttcaaagtatccaaatctctgctcctgtaaagactgaatgagttcacagccaccagatttcaaagcattactggaagtcctgttccaggtggggggctgactaggggctctttgatgccttgattgtccttaggaaaagatgatggttttataatctcctcctagatctggcctgcatccctttttctttaaaaaaaaacaaagtctgtttttattcaaagtcatatatgcacaaggttaaaaacagtttcctgttaaaatacttcttactccctgttctgtcccccctagacagccacatctaacttttttaaatgtcttttcttatatttacctccatttttctaaataatatgcttctactgatatttcttgattcatcaattttagacacaatctattgacttactgctagaatagacaaggatttatctcactcacaccacctccatccctcctgccatatctctatttttagttcttctattggttacttttgtgatcttccatcctctacagatgcactttttaaagagaatttgtacattgtacaaaaagaatatttctacccccatccttcccttcacctcacctctcccacttctacctcctaatgctgtctgtcatctacacttctacttttacactgtaaaaactgataatatctacatctactctgtaaccacaatagttctttcagattgattccaagagttgaaaatcactgaaaagtatttctattattgtgcctaggtaaagactgttcactacagagccaagtagtgtactataatcacagtttcatttcagatacaaatgtgtatgtgtgtgtttatacgttttgagttgtctttctttattctttagtcctaattgtctttgtcacatttccaattttttaaaagtctttataaagcccattctaccgagttccccttttatttagggaccaccaccacccctgcctgctggagcactcagttctcttgcttcaatctggactggttgttctttatgcttgtgcacagctcttctgatttctatgtatagctttttgcattcccagtcttcccctattttgtttactcccttacttattaaaagacatcctcaagttgcttccttaaaaaggatttatgggagacagtctatgggttcttgcaatttgaataatgggttggtgggatgtagaaagcttaggttgaaaatcatttctttcagaatgtgaaagtgtctgatgttgttgatgacagtctggtgcaggtctgattcttgttcctctgaaagtgacctggcttccttcttggaaatctttagaatattctcttctcctgtggctcttttgactcacaatgatgtgtgaattggtgtgggctcttttcatttattgtgttggatgcttaaggggccctttatttcttattttaagctggaacttacaggtagttttgtagctattgtaacaaattttgtaacatattataaactacacaaatacatatcaagatataaacatttccaggaccccaatgagtccctttatgtctcctcctagttgataactttccaagagtagccattgttctgacctctatgaccatagattagtttttccttttttgagtttcatctaaatggacttttacagtatgtattctttttttgtttgacttcttttgcctaacatttctctgacattcacccatattgttccatgtagaggtttttagttctttttcattactgcataatattttgttgtgtgtacaatttctttaaacaaagttgatggacatttggaattgtcccaagttttttaaaaactatgtttagggggtaaaattgcaggcctcttgcatacatatgttatgttgtggtgaagtttgagctttttgtgtacccatcacccaaatagtgaacattgtacccaatatgtaatttttcaaccctcatctccctcccatcctttcaccttctatattttatccaatgtctgttatgccaccctgtatgtccacgtgtacccattgtttagttcccccttgtaagtgagagcatgcagtatttgactttctgtttctgaattatttcacttagtgaaattgtccccagttttgagctattataaacagtgcttctacaacattcttgtacatgtcttttggtggaaataagtattcatttcacttgagtgtatatctatagatagaatggttggatcacagggtaagcatatatttagcttttgtagatcctgccaaacagcttttcaaagtgattgtacaaacctaaactaccaccaacaatgtttgagagtttcagttgctccacattcttgccagtattttcagacctttatttttgcaattctagtagggatgtaatggtatttaattgtggttttaattagcatttccatgatgactaataatattgagcactttttaatatgtttattgaccactctgtatttcttttattgactttcgttgtaaagtgcctattcaaatcctttgtttatcttaaaagtaaaaatttcttcctttatgaatgaatttatgtggtttccttatagactgtagatacaattccttttttggatatatgtgaataatatgtgtgtgtgtgtgtgtgtgtgtgtgtgtgtgtgtgtatacacatatacctaaaaaaggaatttgatatatatcctatatatatcaaattcataatacatatcaagatataagcatttccaggaccccagtgagtcccttcatatctcctcccagttgataactttaaaaaagtagccacttgggaaattacctcatatatatatatgtatataaaatcaaatatttttccatttttggcttgccttttcactatcttaatatggtctcttactgaagaggagttcttgattttaacagggttggccgggtgcggtggctcatgcctataatcccagcactttgggaggctgaggcgggtggatcacttgagatcaggagttcaagaccagcctggccaacatggtgaaaccctgtccttactaaaaatacacaaattagcagggcatagtggcacacgtctgtaatctcagctactcaggaggcaaaagaatcgcttgaacctgggaggcagaggttgcagtgagccaagatcatgccactgcactccagcctgggtgacagggcaactctgtctcaaaacaaaacaaaacaaaacaaaaattaatagggtcttatttaatgatattttcttttataattaatgggttttctaattctgtttaagaagcctttgcccatctcaaagacatgaagcaattcttctggggggtggggcaggtttcctttggaaactttattgctttactttttgcatttatgtctatgatccatcctgaattaatttttgtgtatagtatgatatcagaactaagattcatttctttttcacatggatctccaattggcccagtcttgacagaccctttcagtgtgtagattcaggttattccacgtaggcaattatttgtattgttttttaataatctttacccctttgttttctctgttttggagttcctattattctgatgttagaattcttggaatattcctctgggtctcttttcaacacacacacacatacacacacacacacatattctctctgtctctttctctctaccctctccacacacacacacacacacacacacatatgccctgtgtgaaaacaggaccctgaaactccctctctgtactagatactactatggggaaataaaggaattggtgcagtgttattccctcatatccatgactccctcctgccatacccacacttaccactgtagctgataaatgagatggggggaaaatggctgggggagagggaaggtgaatgataagaaggacaggcccaagagctgtgtcctggaccagaattgtgggatagagttaaaaccaataaaactagcatctttgcaccaaagcctcccacctcaacccccagctcagccctgtgtcttctcaatgcctcctgggagcaaaataatgtaaaatatccttccaagtagctaatctgcactacaaagagaagttgaggggaaagacttaggctacagggaaggattcaaattgaaaatgctcaggggggcccaataataaagacaataattcagctccttactgagcaaacccagaacaaagaggagaaattgccgagctcctacctgagtgggatggagggacagggagcagtgaaacggacaggttggcagacaggacttgaaccacaaatgcccctttgagtttctctggagaaacttagaggtctgtagttttaataaaccctgttatggggccaaaaccaaactttgccctggctgcttaaggctcccaagtggagctgtaaatattcctgccacagggtaagcttgaccagagtcctggattcagtgggagtcttcctgcacctccaagatttgcccgtccaaagaaaggagtgggcactaacgttggaatcaacagttacacgtcaggaagtatgctagctactctgttccttattgcatacaatctccaatggcccagtgataatggtaataataaaatagtgagcacttactgagagctcattatatactagaggctgtgctttatctcattgtccctcacaacaaaactgagaggtagaacctattaataacccccacttttccttggcaacagctttgtgaagatacaattcacatactgcagaattcgcccagtgaagtgcacaatttgatggtttttattctattcacagagttgtgtgacttatcgccacaattttagaacatttacatcacgccaagaaagaaactcctctcccctttagttatcatttcaccccaatcctctcatccacccagctctagacaaccacaaatctactttctatctcagtagattttcctattctgcacatttcacgtaagtggaattatacaatatgtggtcttttgcaactggcttctttcactcagcattaagttttcagggttcaaccatgttatagtatatattagtacttcatgctttttatggccaaataatattccattgtatggatataccacattttgcttacccatttcatagctgatggacatttgggttgtttctatcttttgactattgtgaataaatgctgctgtgaatgtttgtgtacacatttttgtgtagatgtatgttttcattattttgtgggtatattcgtaggagcagaattgctgggtcatatggaaactctgcgtttaacttttgaggaacttccagacaaaatggctcaccactttatattctcctatagtgcatgagggttccaattgctccacattctcctcaacacttgttattatctatcttttttatatagtcatcccaccagatataaagtgataaagtggtatctcattgtggttttgatttgcatttccgtaaggggaatgatattaagcatcttttcatttgcttattggccatctgtgtgccttatttgaagaagtgtctattaagattctctgctcttttctttcttcttttgagacaaggtctcactctgttgcccaggctggagtgcaatagcacaatatcggctcacttcaacctccacctaccaggttcaagagattcttctgcctcagcctgccaagtggctgagattacaggcacgtgccactgtgcctggctaatttttgtatttttagtagagacagggtttcaccatgttggccaagctggtcttgaactcctgacctcaggttatctgcctgcctcggcctcctaaaatgctgggattacaggtgtcagccactatgcccagccatttgcccatttttaaattgagttatttgtccctttattattgagttgcaagagttctttatatattctaaatacaagttctttatcagatatatgatttaaaatattttctcccattcagtgggttattttttcacttccttgctagtatcttatgaagcacaaaagttttaattttgatgaagtccaatgtatctattttttcttttgttatttgtaataaccccattttatatatgaaaaaagtgaggcagagcaatttagcaacttgcctgagaacatataataataatggacagagccaagattcaaacccaggtctgcagaccccaaagcttcctttgagggcatggagaagtccccatgagcaaggactgtgtttcctgtgatcacgactgaacttctccttactaggagccccaagccctggggaaatgtccaccactgcctgtgtgcatgggggtcaggaatggcccccatcaggccacagcaatcaaatggtgctaccctgtcccagaggcagtactttaaccaccgctcagaaagggccacaaagcacaacaaagaaactttccctggaaagttctgtatagtgtggcctagggtaggtgagcaggtaaaagaaatctctccatctgtggcccatcaactcaccagaggccaaaggctcacacaataaataatgttgaggtattcttacaaagtccttcatgctccagtttaatatttcccatacatcacctcatttttctcaataaatattcattcctcaataaatgtgtatcaggtgcccattcaatgcaaagcagtaagctgagaaactgtggaagataaagtgtttttatcataagattaccctaggagagcagagaaactaatgtctctagccaagagatgaggaaatgtaggcaccagaacatttcatgacctgaccaatgtgacaaaaccagacagtggtgatctaatagagcctagatctctggcctatagatccaggctctgtctacaccatgctgaatgtccagtcaatgtagtcaaaggggacctggagcagaggaccatctcaaggtcatccttgcctctgttttcccatctcagaatgggactcatccattagagaaatatcactcaagaccacaaaagtggaagcaagtgggtctcacagcagacattccttctgcctgttctgctgagacaaaacggtagctccccagcttcagaaagaagccactgccagatgctgactcagcaatccagcttcctgccttggaagatcagggccaaagcaatcttttgattgttattattttatgactaattttccaggcaaatcttttatttgtgcaaaagcccatccagccttgagcacattcttcttgtctttgaattttatctctctttttaattaaaaaaaaaacactcacataaggagacacaaattaggtcaccatcaaagactgctcttcccaaagagcatttccacagatattaaccctggcactgccacttactcaggggatggctgttcacatcgcttcacctctctaggctcagtgtttttgctctgtccacccctcacattctaaggtcctgatttattggcctgaatcacaaagacaaaactctatatacctaggatagcatgacagccaagttgcccaatgaccttcaatgcaaaccaaaggcacgcttcccctgttcttgaggatgacaggcccatttgttgagcacctgtaatgtgtcagaaacctcatctttaatcttcgatcaccattcgatcggccaaaagaattctttttaaatataagtcaaagcatatcatttatctgctcaaaaccctccaaggcttccttttcacttggagtcaaaaccaaaatcctaacaatgccccacagagccctacatgacctgccatcttgccagccctctcttctcctgctgacccctactcactgcactgcagccatgctgggatcctcaccggaccatggcacgccaagcatgtgctcacctgtggggctctgctctggctgttccctctacctgggattctcttcccccagaccagtggttctcaaccaggggacagtgttgcccccaagggacatttgatgtttttggttgtcgcaactggagagagggtgctactggcacctagtgggtagagaccacggatgctgctaaacatcctaaaatgcacaggacagtccacatcacaaagaattatccaatcaagaatgtcactagtactaaggtggataaaccttgacctagatggtctcctggctcacttctttcaggtgtctactctgtccactttgtggaaaataaaaagctgcctaactcagcagtccctgtctcctactgccttatttttctccatagaacttaacaccctctgactccagtcatttctcttttccagctaccgtgtaagcaggggctttgttttgtttgctgccatattctctagcacctgaaagagattctgaacaaataaatcaattctctccatttcataagtggaaactgagtccccacttgagctaagcgccttgctcaaggtcactgtggtggatactgtggtatgctgccaaggtctccccctaagggctgaggctctcactttcccagctgccaggtctgctgacaactgagggctcacagctgagtccctcttcaggcattgccttcagtcaaaagctgcctcacccaagcatatgccccttccctggaaagcccacctccaatgactgttctacaagagttacaaaggtacagcctccttttcctcagtctgggataatgttcaagtgctattctagccccagaactcccccagggggttggctgaggcctctgctgcaacagcagcagagtgattcaacttctccctccaccccatcctgcttccctcactcccttacaggtatttttcctgagtgcacacccctgtaaaccttctgcacacaaatttagttctccagaatctgtttgcaggagaaactgacctatggcagtcacagagcttgaacacagcggaactgggattctaattcaaatgggattgactcggacaccattactctttctgttcttccacaatgcctctgccttgcctttgatcagtcatggtgggttagggtctggggatccccaggtgaatatgacacaggccttgtctttaggatatcctattcctctggaagaagcagttcctcaggaacagggtgccaagggcagagcagatgctggaggaacccatgggcagccccactggcataggctatcttgggatctagaccacagcaatgcccctgccaaaggtcaacaagacaggtcctctgctccaggctcagagcctacaacctccagagaggatctcagccagcagggcttacagcaggcactgctacatgagtcccctgcggtaaacatggaccaaaagccacctaggtgtctgtttttttggaaaaggatgtagaattcccagtccctggctgggtccctgcaggctcagcttaattctcagctccttgaaggcctaatatcctcttaaatgtccttcttccagcttctcctgaggtttggcgctgctctgatgaccacctttatcttttctgcagtttctctccattctctcctgtggctccgcctgttcctgggagtctcaagaaactctccaaacatactcgccctgtctcctatgattccactgcccagtgccacttcccaggcctctatcacgcctctcagatgctcaacaagtatcagaaaggagaaagggagacaggaaggaaaggaggaaacagaaagggaggaaaagggaagagcagttgttgagggaaatgtgaagaaagatcaaatgatagggatgccctatatttatctgttttaatgtctcaggcctccaaagcatcatttagtgtttctccaaacactgtcatcctccaaggcaggtcccttgccttcagttcacagctggaaacactgggcctcaagaaaaagggagaaagctttcctgagtacattccgaagcagcagcaagtgattcagatcttgggcatcctaattgcctggcaatgctgagaccctgggtgtgaagtactaatgggcagattccacccacgtaatgatcagagagtggtgaacagatgcttgcaggcagatcagagccacatcagcaggagcgggagtcactccaggcattcttcacatcccctgctggcttcaggtaagggccgctgggcctcaggagaggcacagtttctgggggaaaccacagccctggtgccttcagggaacagagagtacatgcactctctgctatccagcgctggcttcagaggctaaaaggctgaggcctagctccagctcgtcctcctatttgctatgtagccttggccaagtctctttcctattctggcctccgtcttcctgcctgtaaaatgtgaagggtggatgcagtggtttctgagggacctccagaagggagacctccaggatccagggcccaccaggtgagagacacacgtggaccagccccacattgaggctcactcagtcccctcatggggttgaacaccaacctcgaaaaaccagaggcagctggagcccctcaaggtacctggcctagtccccctcgatttcctccaggtctgtgcatctagactcctggttctggggctgggccctgaacctctcttagctgtagaagaggaggaagagaaagactaacacttgctaagcacctcttctgggctgggcacagaaccattggcttttacacacatttcttgctgggatccccccagtgagtggtcttatccccacctgaaaaatctaaggttcagggaagttaagtaacttgctcaacatcacccagctcttggttgccaaggtcagaattccagcctggagcagtgcatgtttacctttgcattgtcagagaagtcatttgccatcagatcccatccctttcctctccaaaccaaagatcccctgtgcattttggaagaggaagacagcatgttgccctgagaatccaggtttcagggctcatgtgagaggaggtcagacataatggaagaaacccaggctctgggggcagcagccttgaggttgggtcctgactctgctacctgctaactaggtaaacttgagcaagttataacctcaattttcttatctgtaatgaaaggatattaatatctgctgcatggagttgttgcagtaattgagcctgacaatggatataaaaatatctggcatagaatatgtgttggataaatacaaccctccttccatttctgcacagcccagcttctcttaggctcaagttctgattctctctcatattttaagccctgagggatgggcttggatacatttactctagcaaaatgtctctatcataaaggcaagctcaagaaagtggttttcttcctctgcccccggccacagaaccccatcaaggaggcacagtgcaggcagtggcctcggaagcagagctggccatagcaggcgctgccttcctcccccaagcctcagagcttgccatctctatgccttccccttcaagctgaaagctggcacacaggcaccacaagccagatgtttgagttttgttaagagcagcttaaataaagcttttagaacaataattctcagccatcaaagggacatttctcttctggcttcatctctgacacacaggagatttttaaaagaagaaacaggggaggaaaacaacgcctctacaaagcaggaacatttttaaaagcacagcgattttgccatcatgctctagcctttctgatatctccaatgaaagaggaaaggaatttcgtggaagagccaatttttcccagctcttggcacacatctggagccccagaagtgtctgggggaagctgaacaggtggtggccatctgacaagccccctaaggcagagtttaaagagacatacacttggatgacattgccaagttgggaagtttgcctctctctcccttctgacacctcttcttctcccaatcaagactttgccaagagtgtgctttaggaagggacaaagcccacccctccaactccatgcaagagggcacctgggagagggacctgaggctggatgccccttgtagcctagagttctccttcccaaggaaggtgatagtaaagggaacacagaaggtaacaccacccagaaggttggcatacacatggttgcaaacgcttccaagagccaggtacaacacatcattgtcatggtataagtatctactgctaggagttgaagaccagattcctagagactctgctaagcctgacgtagctttaaaacaaaccctgcctggtaagagccattggaggaatcacctgctcaaaaatgaaacaaggctttcaataatgatcaaatggctaccatcagatctgtcctccctcagataacaactataaactctggaaaagatattttaaagctacttaaaggcactggtgaaacaaaaagcaggcaaaaatggaagggaattgacacttggaagaatagcaatgggtggacttaatgtttttaaagcttttctcctgagggcagatcataatcagtgtcacatactgtagctaagtttataggaaatccacagtcttagttgcttgaagaatcagagaaaatgtgggtgaacaaatccagtggaaagtgatttgagaaatcctataagggagagagtcacagagattaaaccccaatttctatgtataaactgcccaaatctctggctgatccttcagcatacatacatagggaaggctccaacccagctaagattaaaagaaataaactgaggttttggctactgtgcaccagaggtgagacagagtttgaattctgagttcagccaattttttttaaatcaacactcttcagaggaatacaatagaacccagagtctctccaatatatcattcacaatgttcatgatactatccaaaattactagacatatgaagaaacaggaaaatgtgaccatactcaagagaaaaggcaatcaattgagaccatggtgacttgacattgtggcttcaatggaacagaagtgggcctggaataagaaattgctttgcaggggaagctctaactatgaggtcagataggcctgggtttgtgtcccacctctaacactcacagctatgtgaccttgacaattagttcctttacttatctgagcctcagttttctcatctgctaaaagaaatctgccaaaagaaaataacactgccttcctttcatggttattatagaatcaaatgaaataatgaatatgaaggtacctggaatgacatttggcatataagataagatcaatgactatttattggctcaaaataatgattttcaaatcaacagtatatccctatcttctctaccacaacagtctttaagtcctctgacattccatctccttcacttatttcttttttgtttgtttgtttgtttgtttgtttgagacagagtctcactctgtcacccaggctggagtgcagtggtgcaatctcggctcactgcaatctctgcttcccagattcaagcaattctcctgtctcagtctcccaagtagctgggattacaggcgtgggccaccgcacctggctcatttttgtatttttagtagagatggggtttcaccatgttggccaggctggtctcaaactcctgacctcaggtgatgcacccacctcagcctcccaaagtggtgggattacaggcatgagccaccacacccggcccatctccttcatttcttaaaatggaaatgttttgaatcaaatgtcctgagttctagagaaatctcaatacaacctaagggacagcccctcccatctgtacttggtcataataatgcatgcattcaaacacatcttcaggaggaccctagaagagattaagagaagagaaagtagcaaggcccctacctagaaatcatttttgttaaatggttgtctgaacaaagtcctccctcctccaaaccctagaacctggaagcctcacctgcaactggaagcatgttgatcaggaactgagggaccacgatagtcataggatcagatgttactcagggtagagggaaactgagagttgactttgtctaatctcttcctttcagacatggggaagctaaagcccagaaaggagctgtcgttgtggcagatgcccgtggaaaattagtagaagaatccatcaccttcatacagcaccttagaggataccaagcacatatccatttataattttatttcatactacactaatactacagctttattagctatgaggaagggctgatggaagggaatgctcttcccatttttgagatgaagaaattgagattctaaaatgcgatagcgatatgacttgcttcatgtcaccctgacaagcaatggctacttggaactcattctaggtctctcaatccttgatcctcagacatagccatttctatcaaaccatgtacctgagaatgctcttcttggagtccatcccaagcagaggaaattggacagaaagtaggacaatcccaggaggatccaccttgggagggggcagggaccagcctctactggttagttatggggggcaaagccagtcagatttgaaccccacttgttctaggcccataaagctctggggctttgatcttggggacagcctttgggacatctctctaggcttctggggctggattgctgtaggggatctcaccacccttagactgaaaggaccccctgggagactgcaaaagtctcagaagaagccttttggacaactgggtctctctctctctctctctcacacacacacacacacaaacacacatacacacactcctgaagaaggctatgtttgctctggaaggccagccaagccccttgacgctggcctagtgcccccttccctctgccctcaccctcttctcctcagtacccagcccaggcctggtctacagtcagattagggtttgtgagtagcccctccctctaatgcctaaggacagtccttgcttcctcattggaccacgcttgccccatctgtccagggcacagacaacttcccccaaggctcatagtctggggctgaggcccaggccccctacactctctccagccccactcccacctctgcctccccgcactgtgcccccggccctcagacctgtcctccatcccttcctcatccccacgtgccactattctggggtgctcataaatcgccaagtttgactcatttttcttcataaatccagagcttctggcctcctgtttgatttgtgttcctgaattatccatgaaattttcaatagcttagcgagcaatggtttcaatcttcaggagcagaggtccccctcagcccctgagagatgctgagctggtgatggtggcgtcaccaaagggggtaaaatcagaaaagaaacggacttagcagggcacacagtctgctcctggaacaacgacgcgtcccctcacatttctttgagcccaggatcatgaatccccaaagcatgaagtctggaaggaaacttcagactcacctgatgttttagaggtttccttttttattgtggtataacatgcatactgtaaaatttaccatttccaccatttctaagtgtacatttgagcagcattaagtgcattcacattgttgggcaaccatcaccaccctccatctctagcgcttcccttgattttccagactgaaaagccaattgcagaaagacaaaagccacgcctcaggctgcacagcatgacctagcagaggccagcttagaatctgtccagccaagggttgccgagaagccagccccggtggggacagggctaagtgtgtactcccagagagaaagggcttgtccctacagtcttctcacctgccccttgcctgggggccccacctgacaggggacccccacccccagcacctactcacccccttcctcctctaggaacttgagaaatggcccccagctgcaatggagccagcctgcggtggggattgaggcccccagctgcaatggagccaggctgtggcaggggctgaggcccccagcaggtttatggaagccatccatccccagctgagagcttaaacacatctacataatcagctcctctctacccgctgctcccaccatttctcatgaaacctcactgaggcactaagtcttttccttttttcttttttgttttttaatagaaaacatcaatcgacagagagcagtccggaaacctcctgcctccactgccaacccttcccctcccctgaccaagtggctgggtaggggtggggctctgtgtagacacaggactctggtgtgacacaggctagatgcaaccctggggtaggagggggacagtgataaaatgcatctccccggcacacacagacacatgctgtgcacaacaggtgcacgtgagtgtgagcatttaattgccgtgggaaaccatttcctgacaataaatgccaccccatctctgtccctctcggctcttgccagatgacttttgctgaaatatttgtccccataatgagccctcagcctctatgtgaataattcatacctgggtagaactgggtctcattgggaggtttgggatgaagtggaggaactggggaaagcagctcctgacagagatgggggcttaggccagtccatcagaagtgggagggaagatcattccctgagaaggtgacatttaagctgacagctgaaagttttaaaagatccagtcatgggaaacagggaggggagagcatttccaggcagagggaccacaggtctccagcccttgcccgccgacaccttgtccaggtgtcttccaggtagggagtgtccctctgccctgctcaccactacctcctatccaggaacacagccaccctgtgtgatgggaccaggcagacattttagagaggaggaaagtgcagcttagagacattgagggacttgctcaaggccctgtggaccaggacaagccagccttcctacctctagatcctgttctatgtacttccctggaggccccaaacaaactgaatgggaccgctgaggccagcacaggtcccagctcctccccagggccccttcattccactgtgcagcacagagagatgctgtcctgccgagcagcctcccaagaaaggtccgggctccagaatcagaccacctggctgcgcatcccactccctgcagcaagctcccttcacctctcaagcctcactttcctcatctgtaaaatgaggtcagtaatgttccctacgtgataaggttgctccatagtgtcagtgcttacatagtaagcactcgaagaaaaaaaaaaaaaaacgtaaatcggattagtactactcaggttcaggcaccagataagactaagtgttttcatttgccttaaaaatgaaacacacgcagtccaaccctcacatccacagtttttatggaaaccaacactttctctatcccattccccctatttcccaccccctacgaatggccaaaactattgatcattgcccccatgggaagaaaacatcaggtggctgtgatggtccattaagacacatgcagagtggctttgcacactggaaggggctgcacaaatggtctttgctgattaccatgctcttggagtaccaacctcattatctgatgctcctgggccctgacactccctctacttctattttttgtttgtgagcaagcagccatacagttgcaccctaagtcatgaacagactttttgtgttgtaatccaataaaacttaccacaaagctaatcagccacacatgggtgctgtgcattatgattattctgcttcttggagataagctcccaatagtaagtaacggctcagataaaacgtaggtttgtggctttttctttgttggttctttggaatctttaaatggtgctggtgttagatttaagccatatcacagacacatatgctgaaattcactttcaggaaattccagaggctctggatccatcagccagggttccctgatgaccctgacaaatccagccacacgcaggatgaggttccctgggccctggagtatgtctctttcattcctcccatcagatgtctgaaacacaagcctgtccatcagcctcagggagctgtgctagtaagatcatggatgttgtcttacattcaaatcctggctctgccactcactagccacatgacctggtataagcacttttctcttcaaaacctagtttccagccaggtgtggtggctcacacctgtaattccagtgctttgggaggccaaggtaggaggatcacttgagcccaggagttcaaaaccaacttgggcagcatagagagatcatatctctgcatttttttttaaattagccaagcatggtggcacatgcctgtagtcccagctatttgagaggctgaagtgagagtatcccttttgcccaggagttcaagcctacagtgagctgtgatggcaccactgcactccagcctgggagacagaggaagaacttgtctctaaaaactaaaaacaccttgtttccccctctatacattatacatggcgtcaatgtaaggataaaggaaatcacatatgttttaacagggtggcatattgtacactgtttcagttcaaataccagcccagctactggaaggctgtgtggccttcgacaagtcatttgacttccctcagcttcagtcctcatctgtaaaatcagaataggaatagtacccatcccacaagtgtttgtgggtattcatagtgatattacatttaaagtgcatagaagaatacctgacacatagagagcccagaacaaattattggagtggttgtcaagcattgttacttgtcctgtgcttggcacgtcttaggcactcttctcaaacatgtcggttccccatgtttgctccccgctggaagagacagcacaggagtcctgggcaatggcagcctaggcacccacagccaccgctgtgtagccaggtaggcagcactgatcctgggcttaatttggagtaaggatggggatggaggggggtacaatctggacagggaaagggcagggaggagatcagactagtgggagcccagagcttaggcaaggcaggctccggatctcagggctgtgacttaacagagctgatatacccaaaaatgtgggtcttcacccttggcaattctgagaagagatgcccagcagccctgactttgaaatgtgctccactcaattgtgaatgaataatttacagtctttgatcttatattgctgagaaggagagggagaagaccatgagggcatcgggtacaagaagatgagaaagtaaaagaggaaataacttaaccctctctggcctatctgaactttcaagtctccctgagagacgactggcagagtctggcactggaaagcctgctgattccttcctgtcggggcccgtgcaccccgggtagcaagagccacgtgaacacatttgggttagtgtgtcaataagattagcaggaaagaaaaaggagaagttgtcagcatgtgagacataaaggtgtaaagcttttatcagtattgccaaatggcttcagtctccccgacctagatcccatcgctcctgctgacaaaccactctttttcttcattcagaaaacactgatacagccctttttccaccagcctgtgggtgtgaatgacatgaacaacacccaaatattgcaagttccaagcacctatctgccaactcaggggatctcaatcctttgcaaacccctctcccactcctgggagccccaagaggcctctcaccacggattgggctgggtttccactctctagtttgctctgcatgtggctttgttctcccaagacatctgcaaattggctatgacaaaaaacattcactaaatgagcttgttaaaagtcatagtattattttaaccaaatagttttgagcaccgactttgtagccggcactgggctaagagctcagcctgctcctccaagggaaaaaaagtcacccatgccctgtccaggggctgcaaggagggtgcccaccagggtgctgcttgggcaccaaaggcttagagagttgatgaaataatgttttgtccacacacacagcttttgctctctggagacgcttggcacaccaaagtcacttggtttagaggggttcacacacccattcccagaatgactgcccctctgtttctcaggcagtctgcagcagccagacctcaaggctagaccttttcagcccccatgatgaattctctctcagggaccccactgtcccccagcaccctggtctccactgcccctccctcttgtccagcagacacaactctaaatatgtgtcaccctattttgtgtcaccctatttgtagacagaattcagtgcttgtcccccacaaaatctttttcttccacgaatccatgaatgcaaacaggtccttgggctaagaggggtcattaccatacatgccagcttcatcagaatctccgctctggcctggccgacccagagcctgctgcctccctcagcaccaggagctctgtcctgattgacaggccctagtgggaaaaagccactggggctcaaggctaggatgaaagcccacttcaacgacattgcctctcctcccagagctgggcctggtcttttctgagccttgcaggaactctgtgtagatgtgcctgggatgcaggtgtccctggcatggccaccttaatctggtccttccagctggaactcaaggtgagcaggaaaatgtgttgagaggggattgaaaggttggaggggtggtggtaacccatgggccagccctatactccccaggctggatgacctagaggttccaactttgacctggatctgggttccaaccaacggtttctgtggcctcctgcctccttgttgaggccaagtcccacttgaggctcccattctgatacctgtgaccaaatccttgggcctgagaccttgctttaatagcaactgaatagtaatttaaaattcaataatagcctgtaatcccagcacattgggaggctgaggagggtggatcacttgaggtcaggagttcgagaccagcctggccaacatggagaaaccccgtctctaccaaaaatacaaaaattagctgggtgcagtggtgcacgcttgtaatcccagctactcgggaggctgaggtggaagatcgtttgaactcaggaggtggaggttggagtgtgccaagatcgcgccactgcactccagcctaaatgacagagactccatttcaaaaataaataaataaataaatgtcaataataatagctagcattattaagcactctgagtattcctgagccagatactgttatctataattcatttaatcttcacacaacattgtgaagtattattattaaccccattttgcacatctaaaaactgaggcatgtgcctcaagggctgatggtcttacctagtaacccatccacctgctaacagacctctcctcccctgatacctctctctctgcatgacattatctaggtcagctcaagtcaaagctgaagacaagactgccagacctatgctagatgcctcatggatatcttattccgtccttaaaacagctgtggatgatgagcattactcccccagtttgcagattccaatactgaggctcagaggcttaaaggacatgcccaggtttgcacagctggtaagtggcaaagctataatagtaagcccctcctcatgcttcctgccacccagcatctcttctacacagacatccaacatccatagctgcaagcaggcaccccaggcttacctctgctccctctcccagctctgatcctggagtctctgttctaggtgagacaagaggcaaggggagggggagaaaggcccaggtaaatgttgcagggatgaagatttgggggaattctctggacaggtgcacccttctcccttccacccctttcttccctaggaaatcttggtgaagagaaatacttggagatggaggcctcttgtaaaactaattaaaggtcctccaagctccacaaacaggttcttcactcccctgaatgccaggctcccaggttcaggctggcaggtgcccctctctcacctgggatgagtgtctcttaacatcctgcccaccctcatctccagagccacaaccccaaccagaggtgagatataggtgatacctgttagccctcaccccctgacccagcacaggaggggaagagagcaccagtgggtcttgccttcctcctctatccccaccatccattttgttttgttaaataaacctccttctgccaaacagaagtaccacttcccaagctccccaatcctgttgccagtcttgtaaaacctggcctcccaatgcctcttacaggaagccttccctgaacagccccacccagctctgcatcccccatactggaatgtgtccctttgctctagctagagccttcctagctagagtgttcctgtaagagtggggaagctatctagactctgcctccaggcctttgtaaatgctgtttcgtctgcaaaaaaaatcactccacctccccttcccaaaaatcttatgcttcaatactgagtgcatatgtcacctcctctgtgaagccatttacaatcacccctcagggcccattattccctcatcagtgcccacgacgatgtacccccttttatcattccctgggatatactcatggccccagagactgagctcctggacaacagagcagagtcttactcagcttggcatgcacagggtcagtgcatagtaggtgctcaagaaaagctgagtggagaagccctttctctggagtgggagctctcaggcagggtggctgggaattttttgcagatcgagcactgaagtggggccaagggcagaaactacctggagctggacaccgcacgggtcctcagagcatgccacaatcggagatgatgagtaaagccaacatttaactggcacttacaagggtgctgggtgctgtgctaattgtgtgtactcttcataataagtgtctcgtggatactattagcccccttttcagatggagaaatggaaggtcagagggattaattaagctgaccatggtgacacaggtattaagtgatgtggctggaactcagatccgctccgactctagaaggcaggcagagaacacgccctgtactgtctacctgtgcctctgggatccacactaccctccattgagcagtaccccctcttgtttgggtttgagttcatggccaaaaagaccggaggctgagctgagttagagagggccgctcctgccccctcccctgccaggattcaaactaccagtggacaccatcaaaggtaaaataccctggtcaattaaaaagtcaattctccactaaggagataagcctcaccgttagtcagatggaagtccttacctggggcacccaccacctgcaaatgctaatcagagaaaagcccatctcagaagtgactgaaacccccactcagcccctcaggctcaggaccccccaccctccccttgctccagccacccaggcccccaggtcccttctggaaaccttgaacctgcctcccctgtttcaccaaacccccatgcatggtagccctgcccctcagcaacctggaggaagagaagccatcttccctcatccagcgctagagtaaagtgggtactctgggcctggattactggaggtaccaggcttggggcaagcagtgaggtactcaggaccatgcatatgctgagaagaaagtaaggggctgagcgcagtggctcacatcggtaatcccagcacttcgggaggccaaggtgggaggatcactttaggccgggagttcaaggctgctgtaagctataatcacacatgccagcctgggtgacagagcaagatcctgtctctaaagaataaaaataagtaaagaaagaacttaagtgtcactttttaaataaggggagggtatgatcatgagcagtttgcttcatcttctgagcctctgtgcgttcatctgtaaaatcggtgggactcctggtggacatgtctctgaggctgctgtgggaaattcaagcagctcacttagacgaaagcattgtaaggagcccaggattgggcagaggtaggagaatgtggcagttattgataatgaggtcaggtgcagtggctcatgcctgtaatcccagtactttggaagggcgaggcaggatcatcacttaagcccaagagttccagaccagcctgaacaacatagcaagaccccatctctacaaaataaaaaattagccgggtgtggtggcaggcacctatggtcacagctactcagggggctgaggcagggggaatccctcaagcctaggatgttgaggctgtaatgagccatgattgcaccactgcacttcggctggagtgacgaacagaacaagaccctgtctctaaaaaaataaaaaacaagtaagtaaataaattttcttaaaaattacaaaggatatagtgacaatggtacacactcttacagagccctcgcatggagcaagcactgttctaaatgctttgtgtgtattaactcctttcaccctcagaaaaaccctctgaagagggaattattattacccatttcacagagaaaacaaggtacagggagcttcggtcaattgcctggggacacatagagggtgtgtgctgagccaggcttgtaaagccaagcactgtggctccaggctgtgcgcttactgtggggcttgctgcctttctaaagctgtagcttgagaaagtccacttctccggacaaggtggccagaggcagctgcccctagatggacacctactgtgtgccaagcactttcctcaccttttcattcaacacagcagcctcaggggccaggccttctcatcaccaggagactgagggccagaaagcctaaggcctccttgctgaagcgatttgagtcaagtcttgattcccttttcctattacttccactccaccccagccttgtcttcctaagcccaaagccctcaccaccctcatgcatttctgggcaacggtgaccagacatcctttgggtgggtggtgaggtgaccccagggtgagtctgcacaaggtcacaccctgcctgcactgcacttcctgacacagtgcctccctctcttcccgcccaggcagccatctgcttagctccccacctccccaccccactcccacctccacactcctgcccagagcacccccagggccctgctgaggggaggcttgtgtgaccacagcctggcactggagagcttcagacatgggtgaggacccttcccctgcagcagcctgagtggggtctcagcactcctggatgcccaccgacatgccccgcaccccagctgtaccccgggccaccttcaggccatgacatctccctccccatggggccaggagaggagaggaggggcccagcccttctcccccttccttctggctcccccacctcaccctcagtgcaactggccaccaccgggctctgcagagggtgcgtggggtaaggctgcccccaacaggcagcctgaggaggaggctgctgtgctcggaaaacatgaaatccttttgccagaatgagagggaggaggaccaaggctggaaatatcagaatctctttgctgggaatctctgggatcctgagccccacccccaaatgctgaggctgggagaaatccattatttaaaaggctgtcaggagcagattcagagcatggggtcaggaaggagggtggaggggctcatggtccagcatttggatttgtcagggggtagcagagataactcctgagtcagagccctcccctagtgcagggtcagagggcatgtgccagcctccaccacctgcacccccttcactgtccctcctgctgactctgggccttaagaaatcccctcccacctccatcctccactttcccacaaccccccattacctagaagtacttcctgggatccaaccagaatccctcctgccgcaactgaagatcaggtcccaatgctccagtcctggtcagtccagagtagagggatatgactgagtggacacagtgtcatgcccttagggcagcctggaggggagaaactggaaaggagccagtggggcgggaggagcttcaggccaagggcagcaacgtgaagagcatgagcatctccttaacacaaatgtctctgcttccttcagcccaaagccccttttccagaaagaccttatgcctactgctctttttcttaattagaaagtgtctgtagcaaggagtgtgtgcccacaccaaccaggaaaactgctaaccagcatttaaaagctagtttgagtggggactggagtccgctcactccttgcaagccaagccagcccaggggcttggcgaggcagtttcttctcggctttgccctgggtttgaatcccagctctaccacttcctccctgagccatctcagggtctcagggtttcctcatctataaaggaagggaaataattcttgcctcatttggtgtttgtaaagattgaaaggggacatcacttctgaaggctttaacacaaagccaggtacatacatattcaaaagcaagtccttctagggatggacttgactgagttccaaactcatctcagccaactcatgcagtgattcttggatcgtgtataaagctcccgacacacagtaggtctgtgcagagtaagaatgatcagtaaccagataccaccaatgaattgttagccagctgagggatttcgtgctgggccctccaatattcaggttcccccatccaacagtcaaactcttcataacttagagctctggattccaggtcaaagctcctgatccttcattagaagaagcagcgagaagatgtccccacagattgatgatgggggtcactggtgcacacagtgtagtgtaaacaagtcagctctctgcatctcagacgcctcaccagagtgttgggctcactgcagactccagctctgggaccccttgcatcaaccacgctaaatctgtctgcttgagtccaggaaccactaaacagacgggaagcatggacttcttcctggctctgtgggggactccaagagttggcctgcccttgacttggagcccccatatctacaggagtcaggctatgcatgggggcctggactcctttttaggaagaaccacggggctcagttcaacagggtcattcacatttaggacagagaagacaaggggctggctagggtcaaagagtgagtcactagggacaaacttgaaaccagatttcaagcctgctgagtcctaggctggggtactgtccctgcatgcagctttgtcctgaggccaggaatggtttcaccaagccagggaacccttgacagaacagtacttagtgctgaagcatacaagtagacctgagttcaaatccccaatctcccacttccaggctaaggcgcctcagacaaactgatttattctctgagcctgtttgttttatctgtaaaagagggtatgatagcttacctcccagggtggctaggaggattcagagagctattggagatgagttatgtaaaacgatgtagcaagttcccggcacgtgacaagcatgcactatggagaaacagtcatcatggccacccctctgtgagctatcttcttatacacacacacacacacacacaaacacacacacatgcacacacacacccactcacacacacaacacatactgaaaatattactaaaagggaagaaaattaaaatctcaagacaacaatctgggactttgttccatccctgcatacttctggtctctatggcactggatgaggggagaagggaagggggaagagaagaagaacagaacccttaagggcacaggaattcacccagaagtgaacaagaaaagggactgggtttcccactgcagtcctgcttcacctcttccaactggcccctgctggtcacctagcaacaagcatctctcccgaatccttcataaatcaccaagagtaccagctgctctcgcctagagatccacacctcacacatcccccggggtcgtctcccagggccagaaccatggacagcactggtgagagcctcaatcacaaggtactcaggtgttcagatgactgggcattctgtgtggagaggagggccagcgggcttgggctgggcaggaccagggcaaaggagtggggccacaactctgccctgagaagcaaaaagggataaaggccactctgaaccatccagacagggttcagagttgtctgagatcacttttcagaaggcacagctgtaagaacccagagttctttaatcccagggactaatggcttggggaaagccagggtcaagcagagaaaagaattggagaggaatcagtggctgatcctgaactgtgtgctgaacatttcatacatgtcatttcaatcttaaaaccctgtaaggttttcaggactgtgagccccattttaccaacacagcagttgaaacccatggaagagacgtcctttgcccatggtcagagagaaattgcagcagccagccctgggattggacttcagatctgaccccagcacactgtaatttcagggttggtgccagaagtccataagacagagcctgctcaaagacaggacttagcagagagcctggcacccagagggccattgccacatgaaaaacacctcatggaccagcgcacacagcagtcggctcagctcctttccatcctcctcccaagacttcaggatcttgcctctgcttctcagtagccctgggctctgggctgcctggtgagtcattgggcccctccaagggtgcccccaggacccagggtctctgacaggccatgagacacactcggtctaccccatgaggcctccatgctgctctggaagccctgagctccctctgagtgccatgggctctttatgactgatccagtgctcttccaagtggtggggctctgcacacagctggcagcgcagctgacagctccacagaaaggcagcgatgggaacggaagtattccttaaattcctgccccttaccgaggtggctagcacagcaggatgggtgcaggacatggggtggcctaccagcatggaggcttcctgcccaagacagctgggacctgggttgcagggtctgcccaagctcccccaatttgcagccctcatagctcttcctgcttcatctgtccactgcttcacagtccctgtggtctggcttgcagccccctaaacatgcctgcctctttcccaccttcatgtcatcccttgtcttagctcttatccccttccccatcaacctggaatgcctgctccacctttcttcctctaattcagcagcgctcagtgctggctgcacagcagaattaccagcagagattccaatttgataggtctgggtggccccaggcatcaggttttttggaagcccccaggtggattctaccaaacaaacttgagaacctctggtggaagagctgcttcttatgatacctcagctcagaggtcacctcttctaggaagctttcactagccatcatctcatcacttagaaaaccagcctcagctatatgcccttcttctgggctcccagggcccctagtacctccaaacatcaaagtccttatcacaccttgttacaagtgtgtcttgcaaagactgtgagcaactccagagccaggactgtgtttgttcatttctgtatccctagcacccagcacaggacctgctacgaaatagcaaattgatgaatgaatgaatgaaggaaccaaggtgctagtgttccgcccactgatgtctcttctccttcctcaaataagtctccaagattgctaagatgtccaaagtccctcatcacagtccggcttcccagcctttgcctatgcaggatcagaggcctggggtgcccccaacatcaacctgggacctctcagattgctctaattgctccagcaagcccccaagattaaccacacagaccccaacaattctccttgattcagaatcccctggtcactttccctccacactttcccctacacctggtcttggaggatcagacaggactgacctcacaggttagacttaggagcaaacctgggtaagagccttgagttcctgcaccaatttcctgtgtgatcacaggccagtcacttaacctctctgtgcctcagagtttccatgcacaaaacaggggaaataatagtaccctcctcacagagttgttgtaagggtcaaatgagttgatagatctaaagccctaaagtagtgccgggtacagagtaagagctattaccgaagtgtctactccctgctcttatctaccaactgggagaaggtcaaccactgggcttgagcctttccagcctgacacattattttactccatcctctggcccaagtccccacccatgggcaaggcccccagaaagggacagtgacaggctctgggtctgagtctggtgatgtttctgtgaacacggccgtatgcccaggccaccacccagccatgaccagggctgaaggatagtcccaaaggacagatctcagaagtcagaccctccccaccaggactgggagaggagcctttttcagcccctcagttgtttttcccgctcactttcagcccctctttccactcaatgaagcccagtttgattccctccactctctcccccctccccttaaacagacaggagcatcaaagcacaaaaaacactgaaattgccaaatgcagtttctctccagagacgacaaatttgctgcaatttgtatttccaaacaggagctgcagctcctgagctgctcccaggcaggctccccacccctcaccgaccatctcctcctgagcatggcactcctcctcccctcctcttccctctaccgctgcagaagagggggcactcaccccatcttcgcctagggtctggggtgctacagtggggaggaattaaagcaagggtgggagagagaaaacagaaacagccacatctgtctgccaacatcaggcagagcacccataaggagtccttgaaccagcttccaagcctagctctgcctgtaattaacaataaaaagaacagagcccgcctcactttgcaagctatgcccatctcatcatttagaacacctcactccttgcaccaccctaagatttaggtggtcttccccccattttacctgaggggggatgtgggactggatcaaagtcatgcagttactaggatatgaggttgacctctagcctccctgacccccaagctcagattctccccaatcccaccccatgaccttgggcacctcttcagatctcagttttctcatgtgcatgtgcaaattgaagagattggaccagtgttcactaatttttttttaatctatgccccttaaacagggtatgatgttaattttatctgtcaacttgactgagccacagggtccccatatacttgatcaaatgttattctgggtgcttttgtgagggcatttttggatgagattaacatttaaaccagtggaatgggtaaagcgactgccctcccctgtgtgagtgggcctcatgcaatctgttgaaggcctgaattgaacagaaaggctgaccctcactgaagtaaggagagagaatccctcctgtctgactgcctttgaatcgggacatgggctattttctgccttcggaattcagggaaatattggctcttcctgggtctcaagcctgcaggtctttagacaggaactacaccattggctctcctggttctcagaccttcagacttgtactagaattccaccttttggctctcccagatcctcagttttcaaattcactctgaagatcatgggacttgcctccataattgtgtaggccaattccttataataaatgtatacaaacacacacacacacgcacatctgattggctgtactcctctggagaaccctgaccaatacacagggacaacatccaaatctcataccccttctatgatctgtattatgaaaaacatacagggtttttgtttatttgtcttccaaagggaagattcctttccaatcattgttaacattgaatgtgcttcgccatgtgctgaatcctccttgccgcaggagagtcagatgtgccccagtgtcggggcagggtctccagcgctcagcccaccccaccacacctgttgagaagctctgggctcagtctcctgggggctgttgttgctcacattctgtgaaaggcagcagagcctaggagcactccctccacagcaagagcctgggcaaggcacttctctccaaacctcaatctcaaccatgggaataataatagttcctggtggtgttgtgaggattcaatgtgcaaatacctgtaacacactgaggatgctgcaggaagtgctcaagaaatgttcgttgtcattatattctatggagttttaatcccttgaggagtcatcatttgcctgccccctcccaaccacaccccccacccccactcatcccaggaaactcctggagctactgccgtccccttcgctgggtcctgggaaatcactttgtggacatgtctgattactgcagcctctgaatgatagggatcatccaggattattgcaaatcctatgatttgtgtaaacccaaataagtcacagcctctgcagacttccatttctttgtatttgaggaagtagccatctggggaaaatgttaagttagatctttacctcactccatacaccaaaataaattccagatggatctcaaatttaaacataaacaatgaaaccataaatgtactagaaaagagagataaatcttaaagtgaacaaaacacctttttaagtaggacacaaactacaaaacccagaaaccataagagaaaagatgggtaaatttagccacataaaaatgttttaacttacctgaaaaacagtagacataaagtgaaaagacaaatgatgagttcaaggaaaatacatttaatttgtatttcagaaaaagggctaatttctttaaggtgaatggaaagttaatgagaaaacatcaaagacccagttttaaaaagggataaagaacacaatcagacaattcacagaaagggaaatgaaaatggctcttggacatataagatcttcaatctcattaagaaggaaaacacacatgcaaaagctacagcaggatacctgtggcttttcatcacttagaataattctgtttggtaatattccattgtggaaatgttagaggcgtgtgaaccagagcaactccatcatgaataggagatgggtaaaatgaggctgagacctgagacctactgggctgcattcccagatggttaaggcattctaaacacaggatgagataggaggttggtacaagatacaggtcataaagaccttgctgataaaacaggctgcaggaaagaaacccactaaaacccaccaaaaccaagatggcatcaagagtgacctctagtagacctctgcaacactcctactagtaccatgacagcttacaaatgtcatggccatgtcaggaagtcagcctacatggtctaaaaaggggaggcatgaataatcaccccttgtttggcatatcatcaagaaataaccataaaaatgggcaattagtccattttggagtagccattcttttattcctttagaatgggcattcttttattcttatggagtagccattcttctaatcctttactttcctaataaatttgctttcactttactctgtggacttgccctgaattctttcttgtgagagatccaagaaccctctcttggggtctggatcgggacccctttctgataacagaaacaggaagtctcatgttttgttggtagggatgaaaattgataaaatgtatatggaaggcaatttagcaaaatttgacctcagcccttccacttctaggaaattacccaacaggtatctttccacccatgcaatatgtaccaggctatcattgccgtacaacaaatcccacaccagtgggcataattaaccaaatgtgggacactgggccaagttacttaccttctctggagctcagtttcctcatctacaaaatggaaataacaacagaacctacttcagaggttgttttgtcacatatgtatgtaaactcttagaatagtggcctggtgtgtagtaaatgtttgaaaagtgttactgttcatatcattactatgattaatcttactttctgggacccagccagagactgaccctgaccatgtgagcaaggagtttgggaacagccaaatcactcatcatcctcctttaaggaggaaacctcccgcagcaagacgagattgcaactgtaactgagtaagtagaaacttgtcattgcattgtgcctgatgtctacagatatttggtcagcaatggaaacagaaagaatggctttcccagaagcaaatcttgacggcgcctatcctagctctcttaccctggaagagagcattttggctaaggagattggaccattcctcctttcaaatctcctcaagtgatgagtgaaagccctgcttaattaagatcttgcttaattgctactaataatcacagtaacagctaatcttttatcatgtgttttctaactgccatccagcattaagcacttgatataccacagtgcattttacccaacaacagccctatcaggcaggtatcatttttcttcccatttcacagaagagaaaatcgaggctccaacttacagaaatttgcacaacagttaagagtcaaagcccatatttagacccgtacctttgttgtgccacctggcaaggtgggcattccatccacctggcatttctctgtgtaaaccacagagtagccttctggcttgtgtgcatctgcttcttgtaggtctctgtcaatgtgaattggcctcaaaggcacgacctcttgagtgtaaggacaaaatttggtttctgagcctagcaagtcatgggccaggtcatgggacccagccagcccatgtgaggcatgcatttctgtccttaccatattttgagagagagaaacagaggctgtatgtggcccacccagcaacagcagaaccaaagttgcctgtgtccttcctactgcatctccccaggcacctcaatgtctaggaaacctcagccaaggctgtgatggcagggagggatttaggcaaagctggaccccaggtgaagtaggtcttcctgcatgctcctacaatgacaagcggttcccaagcagaatcagaattcccttcaagccattgagccccatctcctcccacacaagggcagacacatgtggactgccagctgtcctgactaattatctcccaaacaaaggagaggtctgcacgggtgggtgggtgggtagtcagtgcctggcttcctggaatccttgtagtccctttaacacaagataaattgttgcctctgattcaatttcttcctccctctcccccaccctgctcagtttcctaaaacaataagaaaacacatttctcatccctgcatttaatccttcagacagggaacaggagctacacatctggttcccagcataaaatgaggagggagggagccagccagccaggggcagtgggtgggccagtggactccagggaggaactcggaagggaaggcagcttgagaaaaaattcttggaagaataggtcgcagctctctttactatgtccttagtgagttaattatttgttcattcaactagtatccattgaggcaggcctgctctacatcagggagacagaaatgagaaagatacagtccaaggttccccatgcagtaggggagccatacctacgaaccactagctggattacagcatcacacaaactctcaagggagtgttctgggttccaagggaagaaggatgtgggaaggcttcactctggctatgaaaggttttgcagtagattaggcatttgtgctaaccctcagaaatttgtcaggcagataacctggggaggaaaaatgtcattttaataatggcattctaacactgcaatggttcattttaataatgtcattctaacactgcaatggtccttatggtgaacatgtatacagagctttaccatttgctaagtgctgttgcacacttcatcttatttacactcacatcaccctcataaagcgggggttgttctgtcatacccattctgcagatgaggaaacagaagcccaggaggtgaaaatggcttgcctaggtctccccagccaggcaatggcagagctggaattcaaacacaggtttgtctggctctaacatctgtgttccttctatgcctctagagatgccagtttgtttcccaggagaagggtgctgcaggagaggcagcgagggtagagtgggcgcaaggtggggtgaaggagagaagatggacagatggtgctggctccctgaagccagccagccgccacccccggagaccccatccaacatacacacattgccagcgtgatgttctcacctagccagcagccatggtgggtagtgcatgtgggtagttttctgaaaaaaaggatgtctggtctgttggcttggattggttctataattatggaattacagatacgtatacagacagtccttcatttacaatttttctactttacgatcatgtgaaagcaatacccattcagtagaaaccacacttggaattttgaattttgatcttttcccaggctagcgatatgccgtacaatgttctccagcactgctgggaaccattctgtttttcactttcagtatagtattcaataaattacatgacatatttgacactttattataaaataagctttgtgttagatgattttgcttaactataggctacagtaagtgctctgaacatgtttaaggcaggctaggcttagctatgatgttaggtaggttaggtgtattaaatgcattttccacttaggacaccttccatttatgatgggtttatcaaagcacagccccatcaaagttgaggagccatctgtctgcgtgtgtgtgcgtgtgtgtgcacgcgcatgtgcatgtgtgtgtgtgtaatccactgctatgttgaaaatggattgaaggaacaagaatatgactttttgcagcacttacaaagtgtcacaggccatgctatgttatccatctcatcagttgctcttgacaaccctgtccagggatatactaacatactacaatctccaccatacagacaaggaaactgagtgtcagaaaggaaaagctacttgccccaagtctctgacctgcccctgagccaatgctctttcctctgcaccataaatgtcagaaaaaaagcaaccaaagatcctcaggaccccaggagtctgagggccactgtgtagcatcctcctttgtccccaggggcctccagagagtcccctccccttcattttaagacgatcagtgtcaacaatggtaattattagtgctaacatttatttatcagagcatgtccctaggaatgctgaccacaaagttaaaccaaaccccaagagagaaccagatttccaaaggatgccatctctacatctagggaagtgtgactctaagaaagagaaagaatataaacagaattgtagtatgccctgagagctgaagttttttggagcctggaaacagaaggatattcaaatatcccaagaagccaacaaatgcaaaatccattcgtgtgctgtggtggtctaggagggggctgccaatctctgtgagttgactaaagaactgagaatattggggcgtggattgtgcatgaacaccacctttttttttttatggagtccctgacaaagagcatctaaaaaaggagcttagtggcttccataaatgccactgataagaatccagccgacattgtggtcaataattctgattactatgcaacttcaattgtctgagaaggtgacccccaaaactacttgggaaggtataattatctccttagtggtaaggctctttcatccttaaatatagaaatattttagattctcaaacccacaggatgaatatttttagatgtgaaagagtctgagagtatttggtaccttaagtgtgtataatgtttgagaatttggcctacttgaatattggtcagcctttaattccaatctaaaatataattttacaattgagttagatttgtgatttttagttaaaaaatcatattaactttatacatgcttaagtttctcttagatttgtaagaattacttggaaaaaaagtagtcagttgggttagtatagtgtttaaaaatgaaatatattaaatttataaaatgatattttaaatatgtgaaggtattttattaagtttgtaaatggaacagacgccatccaaacgcccctttaaaattactgctaaaatttagttaatcttttttttttttttttcaacagggtctcactttgtcacccaggctggagcacagtagtacgatcatggctcactgcagcctcgccctccagggctcaagcgatcctcccacatcagccttccaagtagctgggaccacacgtgcacactaccatgtctggctaatttttgcattttttgtacagatgaggtttcgctatgttgccaaggccgatctcaaactcctgggctcaagcaatccacctgcctcagcctcccaaagtgctgggagtacaaccatgagccattgcacccagcccaaatttggtaaatcgaactgggtaaggaaaaactagatttttatacaatgtataactttaataaattagacattccttccaaaagccaaagcaacttctaaaatttttttctgtgcttaaaaactgtctttgaggactgaaaatacctcaccccgacacagagcacttcctacatgctcagagccaatgctttaaatgaatgatctcatttaatccttacatcaatgctataaagtcggtactgctattatctccatcttctggggctgaacactggagccaacgttctgaactgagacagtaggaattttagagttatctgtcttaatccctggtacaccatataagtacccctcgatggggctggcttagaacattattgaaacagcctggtggctggcctcttcttcctgtgttcattagtgtttgggccacagctcctgtcctcatctctggacttatctccacagctttgctactcactgtgtggtccaagaactcaaaacatgggtgtcacctgggagtttattagaaatgcagggtctgccaggcacaatggctcacatctgtaatgccagcactttgggaggccaagatgggcagatcacttgaggtcaggagtccaagaccagcttggccaacatggtgaaaccccatctctattaaaaacacaaacattatccgggtgtggtagtgcatgcctgtaatcccagctagtcaggaggctgaggcaagagaatcaattgaacctgggaggcagaggttgctgagatcacaccattgcactccagcatgagtgacagagcaagactccttctcaaaacaaaaaacaaacaaaaaaagaaatgcagaggccaggcgcagtggctcatgcctgtaatcccagtgctttgggaggccaaggtgggtggatcacccaaggtcaggagttcgagactagcttggtcaacaaggtgaaaccccgtttctactaaaaatacaaaaattagccaggtctggtggctcacgcctgtagtctcagctactcaggagaattgcttgaacctggcaggcagaggttgcagtgagccaagatcgcactactgcactccagcctgggcgatagagcgagacttcatctcaaaaaaaaaaaaaaaaaaaaaagaaatgcagagatgcagagtcttggccctaccccagcctttctgaatgagaatctgcattcacaggaggcccaggtgatgtggctgccaccagagtgtgagaagccctgctctgcagtgctactttggatcaatctcacctgaccaggcaaaacaagttgctgaactgctgctccaatgtccctcctcccagaagacccctggcctcctgggagcaaatacagtgtcaataagaggggtggcagacgccccgtccgggagggaggtggggggtcagcccccgcccagccgctgccccatccgggaggtggggggcaccgctgcccggccgccccttctgggaagtgaggagcccctctgcccggccaccaccccgtctgggaggtgtacccaacagctcattgagaacgggccatgatgacaatggcggttttgtggaatagaaaagggggaaaggtggggaaaagattgagaaatcggatggttgctgtgtctgtgtagaaagaagtagacatgggagacttttcattttgttctgtactaagaaaaattcttctgccttgggatcctgttgatctatgaccttacccccaaccctgtgctctctgaaacatgtgctgtgtccactcagggttaaatggattaagggtggtgcaagatgtgctttgttaaacagatgcttgaaggcagcatgctagttaagagtcatcaccactccctaatctcaagtacccagggacacaaacactgcggaaggccgcagagtcctctgcctaggaaaaccagagacctttgttcacttgtttatctgctgaccttccctccactattgtcctatgaccctgccaaatccccctctgcgagaaacacccaagaatgatcaagaaaaaaaaaaaagaggggtggcagagaaccacctggcccagcccttagtatgaggctcctctacaatgaagtttttccaaaatcagctactgggaaaggtaaattttgttgaactgcccaaggacacactaatctttaattatcctgttaatgtctgtctccccccaggtagccattacacaggcagttaccacgatgccctggctttaaacagcttgcagatttcctgacagtattaatggaagttttgcaaattgatttggggagattagatggagggaggctgccatgacttaacatgaagcccattctaattggctcagatcctcctgtctttgatccctggccagggcaaaaggaaagaacaggagtcaggggacccaggttccaggcctggctctcctgaaggaaacttgtgaccttgggcctgccacttctcaccgtgcctcttccttaaaatgactgggttggactaatgtagactcattaagtggtctctcctttcatgatttctctgatttctatgaattagaggctggcagaatggctcaccttagaggaacaagcttccttccttccttctttccttcatccatttattcactcacctcttcactccatacatatgattgaggatctatatgaggctctgcaggaggcaccaggaacagagatgaattagctgcttctggctggcaataaagacatgctcaggaaaatcaaaggcaagcagtgcccaccatggactgggctaggttggcattctgggttcagggtatactgtccctgcctccaccatcgcctctgctccaaaaagacccagaggaggggagaaccggaagagaagtgtgatgggagaattggccttggtgccagaggcctggatgctggaaccagctctggcttgaatcgctgtgtgatctggagccaccttctgtttctaaccatcagtttccttccctgaaaatggggaagtggggatgataattcttattctgcctcactgcagggtagtcaaaaagagcgtaattagtgagccccagggccttttgtatatggattgggggagaagggctaccatcttttccattgccagggagctgccctgtctgtctccaaggaatccagccacgagacagagtacccacaggccaggccctgggctgaaatttccaccacacccagcccccatctcataagtgacagtgacctcaaacttttaaaatattcccagggagacaggcaggacaagaacaatggggaatggtcctagagccgaggaaagcagagtgacagccaggagaaaggcccggggtctgtcctgctccccacagagggcccttggtggggggcccggaccctcgagcacatccccaacactaaaccatcccattgctgagagccaggggcccatctggactctagtaacccagggaggtgaagtagctcacttggggaagtgcccctggtcccacacccagtgggggcagagttaggattctcagagttaggggccctctggctccccccatgcacaaggtgtgctcctctaagctgggcccttctatgtttctgtccttatctttctagcagccagcatctacgtctcagctcctccctcccgctatccgccagaggctggagtgccttcactccagcaagctggcaaaaccacatgcctcctcctaaattctgccaacaccacggtccccaactccagagcttctgctggctctgggctcatcatactcacctctccaccatcactgccaacagcagcaagaagggtttatggggctgggttttattcgaaaaatatgttttcaattaaagttgagaagtatgagagaatgctgccttaggcaggcagcccctctctgaggcttccttaaacagacggtttgtagcatttttaattaatgagaggtggtacagatgggggcccttaatagcctgcagcaaaatgtggaggctggggaggggagggaggtgacactaagcaggctctgggccagggagggagcccagcccttcagccctgtctcctccacactggcctccctggcggccttgagaagaagaccgcgcaccctggattctctctcccctgcacccgcatgcgagaaacgagggaggtggaaacatgctgctgtgcacaaatcaaacggtcctgaagggtgtttgcagaccttgctttaagaatctcacacccctctatccccagatctctaccttgagcaagccttagtatcctcgtgggcaagacaggattggggaatcctaaacctccaggcttgaaaggattacaaagtccatgtaattcaacccaggcacttgcatagctaccaaaactctcctgccaagaggtggcctggtctccgaggccagggtcctcattacttcccagagtcattccaaagccagtgttacctgcggtcaactcttgttagaaaacaaggggaactctgcctccctgagttaattattatatttgtgaagattaagagaagacaatgtatatggagttgctttgaacactgactgaagctatttttaattattgaagcagaggatctggagccaagagaggagaatgtaggagtccgctaagacaggggctccacacagcatcccaaccttggctgtggaagcccactgcaaccagcctccccgaccctatcccaccctagagtctgtccacacctcctggagtatttgctcatccctcaaaaagaaagcatggccagagatggagtacgtaggtcagccttaaccatttactcaatcagtaaaattccccagacgtgccagggagaaatccactgggaacagagagcatattccaatctgatttggggggagatgaacaatgaacaaatccaggattttatttaatagtgatgactgttccaaataaaataaagcagaagatacagaacatggcaggagatggagctgtttttttaaaaaagaaagggtaactaagttgagttgggggagtaagccctgtgagagtctggggaaagagtgttcttggctaagagaaaagttggctgggcacggtggctcatgcctgtaatcccagcattttgggaggccgaggtaggaggatcacctgaggtcaggagttcaagaccagcctggccaacatggtgaaaccccccctctctactacaaatacaaaaattagctgggcatggtggcacgcacctgtaatcccagctactcaggaggctgaggtaggagaattgcttgaatcccagaggcagaggttgcagtgtgctgagatcataccactaagctccagcctgggcgacaagagcaaaactccgtctctgaaagaaaaaaaaaaaagtcagggaaagttcccaagacagaaacaagcttgacaggaggaacagcaggagggccagtgtggctggagagagttgggagggtaagagatgatgaggctggagaggcaggtgtggggcctcttaggccattgtgatgggtgggaatggggatacgggagagccttcctggcagaagccttcctcccattcctgccacagaaacacccgcctcccaggcccatgctctgctgctgcttaaggtttggtgaggacatggaggtgacaaatatttgtcatccactgaggcatcccagaaatgggatggtgaggaagggctcactagatggctgtggcgagggagaaagaagtggttcattactcatgggagacaagagaatatggatttctgtggagaagggaaaagattgtaaaatttagacaaagcagacagagagaagggaagatgccaagtaacaataataatagcagctaacactatgcaccaggcactgctcttaaaactttatttgaagtcccttcatcttcccaaccctgtgtggtggatactgttataatctccattttatagatgaggaagctgaggtacagagaagttaagtgacttacccaaagagtcaaccagttaagtggcagagctgggatttgaaccaggtaggctggcttcagagtctgtgttcctaattattaggatgcacaggacaggagcctggacaaagatggcttgaagagaagcagatagagcaaggggtaggtgagaaggctcaggggacaaatgttgcctttcatactattttctttcctttttttctttttctttctttcttttttttttttttttttttttttgagacagaatctcactgtgttgcctatgctggatggagtgccaatggtgccacctcagctcaccgcaacttctgcctcccaggttcaagcgattctcctgcctaagcctctcaagtagctgggattacaggggcacgccacctcatctggctcatttttatatttttagtagagatgggtttcaccatgttggccaggttggtctcaaactcctgacctcaggtgatccacctgcctcagcctcccaaagtgctgggatacaggggtgagccactgcgcccagcctattttctccccataaaattcaatggtgatgctatccatttggtgcttgggaagttgacacagtgcctttctatctgatcctttcaacgactctgtagagtaggtattatcatcatcaatttatagatgaggacattgagattcaagaagttaagtaaccttactagggatggcaaagacaagattcaaatacaaggtttgtctgtctctccttcccatgctcttttattcattcaaaaggcacttataggtacctgtttagtggcaggcagtgagctaaaagtatttgaacatgggaaagacactgcccttggaaggatcccttggtggtgcccctctcacttgcaccctacacacagacccataaggaacagtcatcttactcttggctgaagcacatgagcaggggtgaggtgggtaggggcaagggagcattcatgagatcctactgtgtgcttggcatttttcttgcattccatcactgaccccttccattagctcagcagggtagatgaggctgaggctgctttacctgtctggcgtccttcttcctaccttctcagcatgagaaccctggtttttttgccaatgagcctaactaaagactacattttaaagcctctgttgcaattaggtgtagccatagggctaagttctggataatgaaatgtcagaggaagtcattgtgtgagacttctagaaaagcttcttaaaaggaagtgaaggccgggtgtggtggcttacgcctgtaatcccagcactttgggaggcctaggtgggcaggatcacctgaggtcaggagttccagaccagcctgaccaacaaggtgaaaccctgtctcttctaaaaatacaaaaattacccgggcgtggtggagtgcacttgtaatctcaggtactcaggaggctgaggcgaattgctttgaacccaggaggtggaggtttcagtgagccaagatcacgccactgcactccagcctgggtgacagagcaagattctgtccccctgcaaaaaaaaaaaaaaaaaaaggaagtgagactgctgaggtgggccctttctattctgttataatggctgaaggtccaacagacattgcagatcattaaggcaactctgaggatgaaaattatgtgcccggaagagtggaacaaaacaattagaagcctgggcctcaaataatagtgagaaaccactatacataaatcctgatttccctgtctctgaacatgagagaaaaataaccttttttttttttcgagaagagtcttgttctggtcaccccaggctggagtgcagtggcatgatctcagctcactgcaacctctgcctcccaggttcaagcaattcttgtgcctcagcctcctgaggagcagggattacaggcacacatcaccatgcctgggtaattttttattacccagagacagggtttcaccaagttggccaggctggtctcgaactcctgacctcaagggatctgcccaccttggcctcccaaagtgctgggattacacgcatgagtcaccatgccggccccgagaaaaatgaacttctgtgttgcttaagttaatatcattcctgatctcaacttcaggcagcccaatgcatgtcttgacttatacagtagctttaccatcattcccatttggaaacaggctgacaggttgcccaaaatccaacagttaagaagtgtgattcaaacttgaatctttctggttccaaaagctatactcctccaatccttctggtaacagcccttgggaaaattcactctctttaactcatgagaaggcacaaacactacagtagagtttagaacagctgaaaacctttacatcccctgctcttgtctcagagatgcacatcagagcagactgtcttacaccttacctatgcactctagtaggtaagttaaccatataccagacagaagggagatttttaatttcccagttaacatctcctctgcctccaaattccaagttgccagactctttcagggatcccatagaaaatgctataaactcactctcatgcaaacttgacaacatgctcttttctcaggaatacttatatttatgaattccttagaattttctagacactggatcatgttgtctgaaaataatttcccattcttgcctaatggcactagctaaaacctctagtactatgttgaagaagtaagagtgggcagccttcctttgttcctgatcttaggtagaatgcattcaggctttcaccctgaactatgatgttttctgtaggttttttgtagatgccttttatcaggttaaggaagtttcctttattctaagtttgagtttttatcatagattttgtaaagaatttttgtgtgtatattgagataattgtgtagttttatcctttattctactaatttggtatattatattaattgatttttggatattaaaccaaccttgcatccctgggataaatcccacttggtcatattatataatcttttttatatgatgctggatttagtttgctcatatttcattaaagaattttgttcacatattgttctgtagtgttcttttctttgatatcaggaatacttgctgtgtcagaagcccacaagaccacttctgggttcagtggatcagaactcagcatgtagttatacttatggccatagtttattacagagaaatgatacaaagcaaaatcagcaaattatcccatctggcacatgggatgagtccagaggaaagttaagtgcaaatttccaaggtcctctctcgtggagtcaggcaagatgttcttaatttttccagcaacaaattgacaatgtgtaaaatgttgccaaccaggaaagcacattagaaacccagagtccaggatcttttttagaagctgattatataggaactacatgcctacatacccaaatgtacccaaaattccagacttccaaaaggaaagcaggtattcagtataaataatactgacagtctgaacatagggtagtgagaacactcccaaatccaaattcccagatatcaaccaaggaccaaccttgaaagcaggcctttcaaaggataaaacctgggcctgctataactcttttctacatacttgcttttaaaacaaaaacccagaccaaaagaaatactaatgttggaattttagccacaggaggtaggaagtttgaatgtcgggacattcttggtaccttcaaactatagtcccttagcttacccccatatgggtgtaaggttaagcctgcatctctagaaagtttaatgtgataataataaagcaacagaaaagggatctcacttcatgtcacgcagtgcttaggcagaaatatttttcctgaactgtaggaaaaatggctttataggccttgtggccttttggcaacattaggccccccaaactgcacatctcatcagtcacagttctggggcagagattgaaagaatgccaaagggggaaacaggaaagcacacacgtatttggcaaacccctgtggcacactcaccaatctgcctccaggcagcaggatcctggtcccacagccaaagtagtgttgacacttctccactgctagaggcaaaagtttgcagagttattgtcattagttgattttgctctatttatgtaacaaactgcatgcccaatgcatactgatgcataactattgatcataataaaaataatggtagctaagcagtcgttaagtacaaagtatggctcaagcactatgtatagcaatcaacacatactgacttatcctcacaacaatcctgtaagataggtaaaatattataatccatttatagatgagaaaactgaggttaggtgactagccccatgtcaaacagctgatagatggtagaggtggaatatggttccacacactatggttccagagctaacattcttctttttagttgttttgttttgtttttgtttttgttttagagacagggtattgctctgtcacccaggctggagtgcagtggcacaatcaaagctcactatgaccttgaactcctgggcttaagcgctcctcccacctcagcctcccgagtagctgggactataggtgcatgctaccatgcctggctaattttttattttttctagagatgaggtcttgccatgttgcccaggctggtcttgaactcctgggctcaagcagtcttcctgcctcagcttcccaaagtgctgggattacaggcatgagacaccaagcccagcctcaacatttttaattgccaacacaaccctgtttcacaaagacaactgcatgacagaggggtttccaacattgtcctccccataggatagtccaccacgttctccaacctagattggggcatagggtagaaaagagtacttttaagactaaggtttagtgaagacaaagaaccaagtaacccaaacaatatactagtaggtagactcctgaacagttaaagttttcttcagtggtaccatcttcctgagcacatctggaaacacaaggtacgtctggctgtcacaaagaatggagggtggtactggcctttagtgcctggatgccaggggtgtgaaacatccaactatctctagaaagttctacaattgatagaacagtcaagcacaatgaatggtgtgcccccactaatactgcatgaccaactggcccttgtatacagctctaggactacagaagaaagaagcaataggaaaaatcattttaagctcactgctctcaaagcctttccttatgcattttgagcttttgtgaagctcctgccaggcaagcatatggcccaaacctgtttctcaacctctgcatctaaatttatctccaagttaagggcagaagccagatacaggcccacaggatatttgtccaacaaggcacttggcttcatcctggcccaggcagcaaacagacacagggctatgtcggtgattcttggactaagcaattgagaaatattgagaaagtctcagaaggaaggagactgtagtcattgttcattgtgaccatcattagctcagttctttaatgccaagaactctgccaagcatggagaagatggcaagtcaggcccatgggaaaaccattcttaccatctgtgggctctagggaaatacctgcaccccggcacttcccttctctctctgtcctcaaacataatatccctcagtaaaggcccaactcgggtccccaagtgttctctttaaagaagggctaatatttatgaagtagctaaagagcagggtagtcaggaatccacaattaattcaatactataaggctatctttataaaatgtttagcagcatatgtttttgtttttgttttcacaaaagccaaccaaaaacactgatcttccaggttcccatctctgtccctttcctattagcctaaacatcaggccagaaaaagtatgattgaagattaaatctaattctggggcacttgattccctcattaaagacttcaatctagaatagaataaggaaagcaagactatttacagagtcactggggatgtccttaatgattatatccttgttcccctagatctctttgacaattatataggcagctgtaaaggaagagtgaatggattgttacaaggccttaatacctagagatattaaactgaattacgttcaagagccaaaaccctgggatggcagtggtattgtgggaggctgggagggtagtaatgtatgactatgagacaggatcaaaacataaagcaatagtgatggcaccaataaagtgatcgcaaagaaatagttattgttacagaaaggactgtaaaaaaagataggttagaaacaagcagtcaggagaatggcagacagggggatatcgattcttggctcatgatattttaactgtagctgggagatttatgaaacaatcttaggataaagtattttttatttttaagggaactgtcatgaattttttatgtacttaaaagttggatattctccaacagacagaaaaattagttaagtaatttgcattgatatggtttggctgtgcccccatccaatctcaacttgaattgtatttcccagaattctcatgttttgtgggagggacccagtgggagataactgaatcatgggggtcagtcttttccctactattctcatgatagtgagaatactgatctgatgggctacaagatctgatgggtttatcaaggtttctgctctccttcttcctcgtttttctcttgccattgccatgtaagaagtgcctttcacctcccgccatgattctgaggcctctccaactatgtggaactgtaagtccaattaagcctctttttattcccagtcttgggtatgtctttattagcagtgtgaaaatggactaatatagtaaattggtaccagtagggtagggcattgctgaaaagatacccaaaaatgtggaagcaactttggaactgtgtaataggcagaggttggaacagtttggagggctcagaagaagacaggaaaatgtgggaaagtttggaacttcctagagatttgttgaatggctttgaccaaaatgctgataataatatgagcaataaggtccaggctcaggtggtctcagatggagaggaggaacttgttgggaattggatcaaaggtgactctttttctgttttagcaaagagactggcagcattttgtccctgccctagagatctgtggaactttgaacttgagatagatgatttaggctatctggtggaagaaatttctaagtagcaaagcattcaagaggtgacctgggtactgttaacagcattcagctttaaataggaaacagagcataaaagttcagaaaatttgcagcctggctatgtgatagaaaagaaaaaaccattttctggggagaaattcaagccggctgcagaaatttgcctaagtagcaaggagtctaatgttaatccccaagaccatggggaaaatgtccccaggccatgtcagagactttcacagcagcccctgctatcacaggcccagaggaccaggaggaaaatgtggtttcatgggccaggcccagggtccccatgttgtgtgcagtctagggacttggtgccttgtgtcccagctgctccagacttggctgaaaggggccaacatagagctcaggttgtggctttagagggtggaagccccaagccttgggagcttccaagtggtaatgagcctgcaggtacacagaagtcaagaactgaggtttgggaacctccacctagatttcagaagatgtatggaaacgcctggatgcccaagcagaagtttgctgcagggggcagggccatcatggagaacctctgctaggatggtgtggaagggaaatgtggggttggagcccccacacagaatccctactggggcactgcctagtggagctgtgagaagagggccaccatcctctagaccccagaatggtagagccaccaacagcttgcatctgcacccggaagagccgcagacactcaatgccagcccaagaaagcagccaggagggaggctgtaccctgcaaagccacaggggtggaactgcccaagaccatgggaacccacctcttgcatcagcataacctggatgtgagacctggagtcaaaggagatcattttggagctttaaaatttgactgccccactggattttggactggcttgggccctgtaacccctttgttttggcaaatttctcccatttggaatggctatatttacccaatacctgtatccccattgtatctaggaagtaactagcttgtttttgattttacaggctcataggcggaagggacttgccttgtctcagatgagactctggactgtggacttttgagttaatgctgaaatgagttaagattttgggggactgttgggaaggcatgattggttttaaaatgtgaggacatgagatttgggaggggccgtggcagaatgatatggtttggctgtgctctcacccaagtctcaacttgaattgcatttcccagaattcccatgttttgtgggagggacccagtgagaggtaattgaatcatgggggctggtctttcccacgctattcttgtgatagcgagtaagtctcacaagatctgatgggtttatgaagagtttctgcttttccttcttcctcatttttctcttgccaccgccatgtaagtgtcttttgcctcccaccataattctggggcatccccaaacatgcagaactgtaagtccaattaaacccctttttcttcccagtctcaggtatgtctttatcagcagtgtgaaaatgaactaacacatgcattaaaaatagatagatctggcagttctagcacatagcagtctagctaatgtggaccaccctccacctcacccctaatttacaaacataaaaatgctagaggaaatgtatggcttgcaatgagataccatttcatacccaataggatggctgttatcaaaaaataacaaatattggtgaagatataaattagtgcccttgtgtactgctggtgagtataaaaatgtaaagaaattcctcaagaaattaaaaatagaattaccatgtgatccagcaaatccacttatttgtatatattcaaaagaactgaaagtagggacaaacatatttgcacacccatgttcatagcagcattattcataatagccaaaaggtagaaataacccaagtgcccatcaatggatgaataaataaataaaatgtggtaggtacatatattggaatattattcagccttagaaagaaattctaacacacactacaatattaatgaacatagacaacattacgctaagtgaaataaaccagtcgccaaaagactgtatgatcccgttcatatgaggtacatagagtagtcaaattcatagagacggaaagcagaatgtgattaacaggggccagggggagggggaaatgaggagttattgtttaatgggtacagagttttagctctgcacggaaaagaagtactagagacggatggtagagatggttgcacaacaatgcacacatacttaatcccactgagctattacacttaaaagtggttaaaatggtaaatttcatgttatatatattttaccattaaaataaataaataaggagcatacaaaacagaaacaaaaactatatggctgagcttaaaaaagagaaagggaaattatcttccaaaggaagtcaaagcagagtgacgaactctgaaggtgaactatagaagccagagaaaataagaaactagatgtaagatctagtctagatgtcaggcttttaacactcacacagaaacaggaccacacttgcaggaaggagttgaagctaaggcccctaaatgaaacaagagccttaaaaaggcacatttacggaggccaatgcagaggctggatgcactccacccacctgccaagtgaagtaatgggaaaacttgctctgctcaggatgcctatgagaaactgaagctctaggcctacaccatgctcaggtgtggattgtgaaattataccacctgagggtttcaaaaaaaaggtaaaaatggtcccatgtttataacttgccaatgagagtgcaaactggtataaaccctatggaagggaatttggaaatatgtgccataataacaaagcctgtacaatagcagaaaacaatgagataatattttcaaagtgctgagagaaaacaatgggtaacttagtaaattatcattcaatagtaaggagcaataaagaccttttgagggcagcaaaactaagagagtattactaccagatgtacactagaaggagaaagaatatatagcagtaagaaagaaagtgaatccagaaggaagaagacagttgcaagaaagagtggtgaacaaagaaatgaataaacatatggaaagtctaaacagaaactgactttataaaataatagtgattctcagcctgaccaacatggtgaaaccctgtccctactaaaaatacaaaaattagccaggcgtggtggtgcacgcctgtaatcccagctacttgggaggctgagacaggagaatcgcttggacctgggaggcagaggttgtggtgagctgagattgcaccactgccctccagcctgggcgacagagtgagactccatctcaaaataataataataataatagtgattattactataactaatttaagagatttaaaaacaagaaggaactaaaatattgaatgagaacacatgtaaacacaggaggaattactgtatttaaaatgttttaaggactttgtattgttagggaggagcagagttactatgttaagtatgcaagttaaaatttttaaattaaccctacagtaataaaaatagaatatatcatttccaaaccatcaaagagaaaaaaatgggaagtagacaaaattgaatcaatctaattgaaggtagtaaaaagagaaagcattttttaaaaagaagagtaaacaaaaagtatcaaaattatatagtagaaataaatctatcactaatcatcaaaaataactaaactcaccagttaaaagatactgcccaattactcctgcaatctcagcactttgggaggccaaggcaggaggatcggtccagctcaggagttccagaccagcctgggcaacatagcgaaaccccatctccactaaaaataaaataaaataaaaaataaatgagccggatgtggtggtgctcacctgtagtctcaactacttgggaagctaaagtagaagaatcccttgagcccaggagatcgaggttgcaatgagttattaaattaataaaatctagcaataatgtgtttttagagacacatttaatacctgaaaacaaagaaatttcataaaaggatgggaaaacatactagaaaaataatatcctttccctatcccctgcaccaaaatagagctggcattgctagatgaatataaaacaaaataagactttaagggaaaaagtatcattttataaagcatttctataaaaatataaattatcaaaacagcctcgaaaggaaatagaaaacatgagacctaaaataataaagaaaattgaatcagtagtcaaaaatctatccttcccatctaaaaaactactagactcagaccaaactgtcaagaaatagataaccctccattttaccaatcaaacttccacagaaaacaaagagtaataattcctcaactcattttatgaggctaatatgtcactgatgtaaaaattagaagaggaaagtagaacaagtaaaattataggccaacagtgcttatgaacacatgtaaaaacctaaataaatattagcattgagtccagcagtatataaatagtaccatatttcattgaatctaaaatgtcactcattataagatgcacccattacttcatagactaaaagaaaatgctatcacttcaaccatgacataatactttatcattcatacattttttatatttactgtaagagctttttaaacttacatatacaattttttatcatatatcgttcctatgcattaataacataggcaaaataataaggtaagatactcttaagacttcataatcaagagtccaactcttctaaatcacttttcaacttagagtctctgacactcattctcaccatcaagaagtggtaatgcaacatttcatgaaaaagtctctactactatctctggcattttcttctaagccattgacacatattctgaaaattttgatgttgaagtttttttctttaacttcctggaacatgacattgtagtacagaaacatactgaaagccaggtggggtggcccccacctgtaatcccaacacttggggaggctgaggtgggaggatcacttgaggccaggtgttcaagaccagcctgggcaacacagtgaggccctgtctctacatacatacatacatacatacatacatacatacatacatacatacatacatacaagaaatatactggaatatgccctgcttagattttaaaagtataagcatagattgcaaatcccacttgatgtaaacaaaacttttaaaacacattttatatatatataacttattatatgagtccagattcagaaacttggggtaaggcagttccagatagtttcatttcacctgtaaactgtgtcactttggctgatattgtaatttgtaaatgtatcatatgtttacagatgtggcctgcattaatgttcctattttggtttttgttgaatctcctgtctgcttgccaaaacctaggatgcttcaggcccatgtacaatcaaaagcagaggcatccttgagcgttaaagcattgaactaactggaaaatgcaatataccatataactgaagtgaaaaaaggctgtatttttgtgtttttttaaataaaagtttgtgtaactttttttaaaaaaagaaatacactggaatactccaaaactgctaaaatgagtgaatggataagtctcaaaaccattaagtgagaaataaaagcacaaaagtatatctacagagcgatacaatttatacattttaaaaacccaagaaaaggctcggtactcaataatcccaccactttgagaggccaaggcagggggactgcttgaggccaggagttcaagaacggcctgggcaacataacaagaccccatctccacaaaaaaaaaacaaaaaacaaaaaacaaaaaaaaaaaagaaagaaagaatggaaaaaaagaaaaaaaaagaaaaattcaccagttagctaggtgtggtgtcatgtgcctatagtcctagctactcaggaggctgaggtgagaggattgcttgagcccagaagtttgaggctgcagtgagctgattgtgccactgcactccagcctgggtgacacagtgacaccctgtctctaaataaactaaataaataaataccccaaacaaaatttttatgttgtcacaggtatgcaaaagaataaagagtggctgggcgcagtggctcacaactgtaatcccagcactttgggaggccgaggtgggtggatcatctgaggtcaggagttcaagaccagtatggcaaacatggtgaaactctgtctctactaaaaatacaaaagatcagccaagcgtgatggcaggtgcctgtaatcccagctactagggaggctgaagcaggagaatcacttgaacctaggaggtggaggttgcaatgagccgcgatcgtaccactgtactccagcctgagcagcaaaactgtctcaaaaaaaaaaagaataaagagtgggaaaaataaaagtgaataggcaataaagatcacctctagggaagaagggtggaaaaagcatgatggggagtgggtgggggaagtggcatcttaacattttgtattttggtatttctttaaagaaaatctggctgggtacagtggcttatgcctgtaatcccaaaactttgggaggccgaggcaggcagatcacttgaggtcacgagtttgagaccagcctggccaacatggcgaaacgccatctctgccaaaaatacaaaattagccaggcggtggcaggctcctgtaattccagctacttgggaagctgaggtaggagaatcgcttgaatccagaaggtggaggttgcagtgagccaacatggtgccactgcactccagcctgggtgacaggagggagactctgcctcaaaaaaaaaaaaaaaagaaaaagaaaagaaaagaaaatctgaaacaaatatggcaaaatgttactatttgttaaagctaggtggagggtacaaatgtgtttattatattactttctgtctttttggtatattttaaatatttcaaaatttaaacaatgttacacagaaaagatctggccatatgcatggtaagcccattttaaaaggcctatcctatagaataaagacaagtttaaaaaggagatctttctttataacagcaaaaaaaaaattgaaaacagaattagtaaaataaattgtggtataaccatacaatgcaatgctatgtaaccataaataagtgatggttcagaagtctgaatactaggccaggtgtgctggctcatgcctgtaacctgagtactttgggaggccaaggcaggcagatcaccgaaagtcaggagattgagatctgcctagtcaacatagtgaaaccccttctcaactaaaaatacaaaaattagtcaggcgtggtggtgtgcacctgtaatctcagctactaaggaggataaggcaggagagtcacttgagcctgggaggcaaaggttgcaatgagccgagatcatgactgcactccagcctgggtgaagagtgagactccatctcaaaaaaaaaaaaaaaaaaaaaaagaagaagaagaagtctggatactgccttagaaagatgctgacagcatattaagtggaaaaaacaggctataaaattatagggttaaaggaaccttctcctatatgcacaaacaggccaaagttccattaatgcacctgccatattttagtctcttatcaactaccatccacggaaagaagttaaccacaagaactctaataaaaataaaaagcataatagattaattctagagtttcaaacaagaaagatattgctataatatctatactgaacagttgtattataagccaaaaataattatttcccaccattggtgtcaataattctctttccagatgagacctgttctatctcaccatctagacagagagctaccagagctagcacagtggcataaattgttgatcatacatacaaaaacagccagataaaatataataaatgatatacaaaataaattgagtcagatattataaacaatgcaacccaaagctacacgccatatttataagaggaaagagtggcagcaaaaagtcactgaaagaattttgagagaaaatgaaacattctgtcctactatatttataccctctgataaattggaaatttacttgggtgtactaaaacctctattttgttaattaaaacttgtcaaaaggtctaagtatcataaagatcctatgctataaaaactgcaatagcatataacaaagagtggggagttaggactcttggggaaatatttaaatattattcctttactgtaaaagtatttattgtgttctttataccttgatgaaatatttttgagactattaagacccaaaagacataaactgcatttattgtgtagaaattcagaatggctcaggctacacaatagtagtcagatgtaaagtgtactaaatttcatcttctagaagggttgattttgaattcaatcatcatttgagagaagacatcccagctcgcataatttcatcaaccaggagaatgttggtggcaatcactgtgctaaggaaaaagatgagagggtgagtaaagcctactaacccactcttagcttttttccccagcaatctttacctatgtagggtactttgttctttaatgatgttagtatgatgttttatgagacaaggctattataaatacaaatacaaatgtcaccttttttttttttcccaagatggagtttcactcttgttgcccaggctgaagtgcaatggcaagacctcagcttactgcaacttctgcctcccaggttcaagcaattctcccgcctcagcctcccgagtagctgggataacaggcacccaccaacacgcctggctaatttttgtatttttagtagagacagggtttcaccatgtttgccaggctggtctcgaactcctgaccttaggtgattcacccgcctcggcctcccaaagtgctgggattacgggtgtgagccaccgcactggcccaaatgtcaccctttgtattataatttaaactcctttgctgataaagtgcattcctgatttatatttcagcaaaattgagcttatttttacaatatcatttgattttctccatcatgcatgtgctattatttcagtaaatttccccttttctttccccctcaaatagtaaggttaatttttcttagaacttaacactgctagatctaaaatataaaagggactatggactataaaatgacagaagctagttctaataactgaataccacacctttcatacacttgacaatttttccactgtacagggacaaaaataatagaaaaaatttcatcttaatattatcaattataactctacaggtctttcactttatgttcatatgaacttaccaagagtgaagaagttgtttttttacacaataattatcccaaactcctgcatctgctgctaccattggctcacctgaaaagtaaaaacaattttcataccaaaatcttagtatttgctattaatattaattgatatcttctaaaaatatttaatacattaccaaaactacttttgtcaaggtcatcaatgacctccatattgttaaatccaatggttgattctcagacctcatctaccagtatttaacacagttgatcacattctgccgcctactctatgttatcttccaggataccacactcttctggttttctttcttttgcattagtggctccttttctgattactttgctgcttcttcctcttcctccctgacctcttaacgttggagtacccaaaagttcagtcccagcctcttttctctctacccttaatccctaggtgatctcatccagacttttagatttaaaccatacacatctgatgactctcaaggttttttgggtgtttttgttttttgttttctttctttttttttttttttttggtgttttttgtttttgtttttgagacagagatcttgctctgtcactcaggctggagtgcagtggtgccatctcggctccctgcaacctccacctcctgggttcaagcaattctcctgactcagcctcccaagtagctgggattataggggcctgccaccatccccggctaatttttgcatttttagtagagatggggtttcaccatgttggccaggctggtcttgaacccttgacctttagtgattcacctaccttggcctcccagagtgctgggattacaggcgtgagccactgcgcctggcctgactctcaggttttaatctccaacccagacctcttccttgaactccagacccatatatccaacttttttaattaaaagattacagatgcttcaactttgactctgccaaaactgaatgctgatgtcctctcacccacaacctgctccagccagtattctccaccacagttgattgcaactccaaccttctacttgttcagttgacttctctacaaagtggagagtggccagagtgattctcttaaacataattaggccacatgcctggccaacatggtgaaaccctgtctctactaaaaatacaaaaattagccgggcgtggcagcagacacctatattcccagctactccggaggctgaggcaggagaattgcttgaacctgggaggcagaggttgcagtgagccaagatcgtgccactgcactccacagcatgggtgatagaacgagactgtctcataaattaattaattaggccatgtcacacctctgctcaaaattgctccctgctcctctaaagtaaaagccaaagtcctgagactggtccaaatgcccctgcatgatctgaccttctgtcacctctctcacctccttcctcagaaacatcagacactggcttttccactggctgttctctttccctagaacacttaaccccagttgcctacatggctaatttcctcacttccttccactttttttcaacagacatctagatgatgcctaccctgaccaaccctttaagctgtcattctctctccaccctcctgtactagcattcatgatcattattatagcactcttttttccatataattcattactttttctaaaatgctgaaggagtttatttattaaagttattatttactgcctaccttctcccactacaacataagctcccaggggcagatatttttgtctgttttgttctgtgtgaagcccaagaggaaaacaagcactcaataactatttcttaaatgaatgaacattttttaagaagctcaaaaataaactaaaggcatccaaaatttaaatattaaagttacccaaacctctactcctttaccataagatctgggtaactaaagaataacctctttattaagcagctaattttccttcactttcttacctgtattcaaatctacgcccacaagttgttttgactcgacatgctcagcctgaacttttactaatgtttcctgtgggtcataaccagcattctgagcaagaacctttaggaataaaaataataatatatattatatatatatgcataataccttcacatatatcaaatataaaaatactctttactcttgtaaaaacacatccataacatggcaatcatctccttttgaagaattccacttttaatctaaatcaaattattatttcatctatctagtagtttttatatttacttaaacatttcccctatgcacgtcacactaaattctgaggacatcagagttcccccatttttaccctactacattaatttccctccttgcaaaaggtttgttttgttttgttttgtttttagtatggaaggaagtagaatgatattcttgtttcctctagtgccgctagccacatgccctccagttcttcataggcacttgctaaggaaaccagaatatttgcagcacctttgtgcccctcatcttcatgaggagagtcacgacctgtggtaacagggttggagatacctgcactccaaaccaggctcacttccaagtggccccaaatcaccagctgatgaggaaaaaggtaccaccaatgtaatgtgtactggggttaccaatttctgtcagcagcaggatcatactgactttgctgctctggggaaagaaaaaatagcaaatctaattcacaaagatttcacaaattatgaaaaattttaataaaaattagcaaagagattttgctaacattgttaataatgttttaattcatggtaatagcatctttgaagtagttttactatatttctaaggtggtttgaaaccaattaaggcaaagacaaaggaatggtcgctttctgtccttaggttgccacatggaaaaattctgttttctctttttctaggaattataatgatgatgacaaatgtaaggttgtatctaggagtgctaaagagcctcaagccctccctctccacaatttaaattgattacatttggataccactaacaaaacaaagatgtaccacaaaatctaactaaattttaaattctaaactttttcattatgattagttaatcatgagtcatttctgaaggaaatttttggagctgctttaatttttggaactcagagaaagaagcaagggggtaagttggctatttcatgagatcgtgcaaggatcctgggctgttatcgcaaaagtttccctgctttagttgtaaaatatctaagagaaaactgtgtaaggaaatgcacataaatacctgtctactccattaactatcagataatatgggcaatttgtaattaaacacctttatgtctaagcagttgttatttggccgaaagggtagttgtaccttgggaataatgagtaaggcatcagcaaaagcttggactccaagacgagctcttccttttatactgttcttatatgtaacaagagcttcagccattgccacttcaattgcaccagctccaggaaccatacaacctattggagagaaaaaatatgattggcaagacatgccataaagaccaaaagagagagagagacagaaaagcaattcactatttaagtatgttctattatctacagaaaccaaataaattgcacagcttagtaattactcagttatcttatgaaacatcctgaagttatatgtcattaaataaataggcatagtacagataactggctgcaaacagcttattttgctccttaccctctggtaaacaagaataatttatttttaccttcatcttactcttttataactactttttttttctgagatggagttttactccatcacccaggctgtactgtagtggcatgatcttgactcactccaacctctgccttccaggttcaagtgatcctcctacctcagccttctaagtagctggaattacaggcgtgcaccaccacacccagctaatttttgtatttttaatagagatggggtttcaccacgttggccaggctggtcttgaactcctgacttcaagtgatccacccacctccgtctcccaaaatgctgggattacaggtgtgagccaccacacccggccttatgactacttttaagaggtatttataatttatattgacaggtaactgattacaatatctgacatgaaaattctttagaccaagatcatttgtctagtttttgatagggaattcttggaactcaatgaagtatttgttttttgtactgcagcagaactcaaactgctatctaagaaaaaatttaagtggtattattctaaagcaagagttttggttaaacacatcaaatttcacatcaggatatcacttttatatctgctacttgtatggtttcataaagtttatgactcttatttaaatcagaaaacttgctttaaaacaaaacaatacgaaaacaatctccccttttatctcacatcattttaaaattactaccccctttcactgcttcacttcacaacataaccgctcaaagagttgtttacccaccagatgattacatcattacctcccattcacattttttaaaagttccttgttaaatacagaatatactcaaaagaatatttatatgtatgatataaagaataaatgcacaaataaacaaatgtatccatgtacctaccacccagcttaagaaagagattactagaacctttgaaaacttccctgatcccattctctgtgaaaacacaacatatcaaaattttagcatccctaaagcagtacttaaagagaaatttatatcacgaaacacctatattaggaacgaagaaagttctcaaactaatgaccccagcttccaccttaagaaactagaaaaggacagggtctggtggctcgctcctataatcccagcactttgggaggccaaggcaggtagatcacttgagcccggaaattcaagaccagcctgggcaacacagtgagaccccatctctacaaaaaacacaacaattagccaggtttggtggcacacacctgtaatcccagctacttaggaggctaaggtgggaggactgcctgagcctgggaagtcaaggctgcagtgagccgtgaccatgccactgcactccagcctaggtgacagatcgagactctgtttcaaaaagaaaaaaaaaaaaaaaaaactaaaaaaggaagcacaaatgaaacctaatataagcaaaagaaaggaaataattaggatgaaagtggaaattagtcaaatgacaaatgtcagaaatgagaaaatttatatcactacagattctacagatattaaaaagaataacaaatgaatattatgatcgactttatgacaataaagttgaaactgttgatcagaagttagtaaactttctgcaaaaggccagttaatatttttcaggccataccatttcttttccaactattcaactctgccactgtaacacaaaaatagccacagacaatatatagacaaatgagtatggccacattccaacaaaactttatttaccaaaacaggcagcaaatcagatttagctcatagatagtagttgatgatcctaacttagatgaagtggacaaattcttgaaagactacaaaccactaaagctcactcaaaaaaaacaaaacctttatagccctacgtctattaaaaaaattgaatgtgtcattaaaagctttcccacaaagaaaactccaggctcagatggctttattgacagtctaccaacatttaagaaagaaataatacaaataataccaattctccacaacaactttacactttcagaaatttgaacaagaagaaaaactttccaattcactctatgagtacagcattgttctaacaccaaaaaagataaaagcattacaagaaaaaatatacacagaccaataccccttatgaatacatatgtaaaaattcttaacaaaattttagccaattaaatcaaataatacataaaaaggagaatacacatagtaccattattcacaatagccaaaaggtaaatgcaacacgtttccaataatagacaaataaaatgtggtatatacatacaatagaatattattcaatggtaaaaaggaaggaaattctggcacatgctacaacatgaatgagccttgatgacactatgcaaagtgaaataagccagacaaaggacaaaaactgtatgattccaattatatgagatacatagagtaaactcatagagacagaaagtagaatggtggttacccagggctggggaggtgggtagggaatggagagatattgtttaatgggttcagagtttcagttttgcaaggaaaaaaagttctggagatgggtggtgataatggttagacaacattgtgaatgcacttactaacactgaactgtacacttaaaaattgttaaactgtaaattttatgttatgtatatttatcacaatttaaaaaataattttaaaaaaatgtaatccattaattttttaaaaagtaaaatgcattataactaagtatggtttatcccaagaatgtaaggtttgacatttgaatcaatcaatgtaatttactgtacgagaaaactaaacgagggctgggtgcagtggctcaggcttgtaatcccagacctttgggaggccaaggcaagcagatcacctgaggtcaggagttcgagaccagccaggccaacatggtgaaactccatctctactgaaacataccaaaattaccctggcatggtggtgcatgcctgtaatcccacctactcaggaggctgatgtaggagattcgcttgaacctgggaagcagaggttgcagtgagccaggattgcgccatggcactccagcctgggcaacgaagtgagacttcatctcaaaagaaaaaaaaaaaaatcatatgatcatctcaatagatgcacaagaagcatttggcatttattctcgtgtgtgtgtgtgtgtgtgtgtgttttgacaaaaaacaacaacaacaagaagttttactcttgtcgcccaggctaaagtccagtggcacgatctcggctcactacaacctccacctcccaggttcaagcaattctcctgcctcagcctcacgagaagctgagattgcaggtgcctgccaccatgcccagctaatttttttatttttagtagagacagtttcaccatgttggccaagctggtcttgaactcctgacctcaggtgacccatgcacgtcagcctcccaaaatgctggaattacaggtgtgagccaccacgaccagcctggcatttattcttgattaaaaactgtcagcaaactaggtgcagaagggagaacttcctcaacctgataaaaacctatagctaacatcatacataatggagaaagattgaatgctttccccctaagatcagcgatgaggaaaggatgtccattctcattatttctagtcaacattatactggaggttctggcccatgaaataagggagaaaattttaaaatatccatattggagagcaaaaagtataactgtatagcagacaatgtaatcacttatatagataattcaatgaagcctataagaaagctaattgtgatttagcaaggttgcagaattcaagatcaatgtacaaaaataaaatatatttctatatattagcaactaacaatcagaaatggaaattttaaaaatagcatatacaatagcaacaaaatacataaaatatatagagataaatatggaaaaaagtatgtgaggctcatatactaagatctatgaaatattgctgagataaattcaagaagactcaaatagataagatgatattcatgagttagaaggctcattattaaaatatcaactatctccaaattggtctacagatttaataaaattccaatcaagcagggtgtaatggctcacacctgtaatccacgcactttgggaggccaaggcgggaggatcgcttgagcccaggagtttgagaccagcctgggtaacaacataatgagacgttgtctctacagaaaataaaaaaaaattaaccaggcatggtagtgcatgcttgtggttccagctacttgggaagctaaggtgggagagtcacttgagctcagcaggtcaagtctgcagtgagccatgatcacaccactgcactccagcctgagtgacagagtaagatcctttctaaaaaaaaaagttctgatcaaaatcccagcagcagtctttttggtagaaattgacaagctgattctaaaattcatatggaagtcatatggaaatgccaaagacttagaatgaccaaaataacttaaaaaaaaaatgagagttaacaatactgatttcaagatttattataaagctacagtcgtcaggacagtatgatattaacattaaaatagacaaatgcatcagtaggacagaaaaaagagcacagaaatagaaccacacaaatatgaaaaactgattttttatacacgagaaaaggcaattcggtggtgaaagtaaagtcttttcagcaaataagactaaaacaatctgatacctttatatgaaaaaaatgaacttgtatccatacttgcaccatatacaaaatttaacttaaaatgaatcacagacctaaatgtaaaacataagactgtaacacttttagaggaaaatctttatgaccctaggttaggtaaagatttttcagataccacaccaaaagcataatccatgacagaataaaaataataaattagacttcatcaaaattaagaacttctctttgaaaggcactgttaataataaaataagccacagaggagaaaaatttgccaattatatatctgaaaaagcacttgtacccaaattatatacaaagaactctcaaactcaacaatagtatactaacacaaatttttttcttttcttttcttctcttttttttttttctggaaacagggtctcactctgacgcccaggctggagtgcagtggtgtgatcatagctcactgtaacctcagactcttgggactcaagtgatattcctgcctcagcctcctaagtagctggaactacaggtacaggccaccacgcctggctatttgtgtgtgtgtgtgtagaggcatggtcttgctatgttgcccaggctggtttccaactcctgggctcaagcaatcctcccatcttggcctcccaaagtgctggaattacaggtgagagccactgtgcatggccaacaatccaattatttaaaagggcaaaagatttaaacagaaaattcaccagatatacaaagggcaaataaacacattaaaagatgctcaacatgggctgaatgtggtggctcgtgcctacaaatcccagcactctgggaggctgaagggggaaaactgcttgaggccaggagttcaagaccagcctgggcaacatagacagaactcatctctacaaaaaaaaattaaaaattagccaggtgtggtggcatgcacctatcgtccagctgaggtgggaggatcacttgagcacaggggtttgaggctgcagtgagccatgattgtgccactgcactctagcctgggtgacagagcaagaccctgtcttgagaaaaatatatatatgtgaggtttgcagccaggcgcagtggctcatgccagtaatcctagcactttgggaggccaagacaagtggatcccttgagcccaggagttcaggaccaaccttggcaacatggtgaaacctcatctctaccaaaaatacaaaaattagccagtttcaaaacctggtctcaaaagaaataaatagattaaatagattaataataaaaataaaatttaaaaagacttaaaggccaggcatggtggctcacacgtgtaatttcagctctttgggaggccaacaagggcagatcgcttgagcccaggagttcgagaccagcctggccaacatggcgaaaccccatctctactaaaaatacaaaaaattagccaagtgtggtggtgtgtgcctgtaatcccagctacttgggaggctgaggcagaagaatcacttgaacctgggaggcagaggttgcagtgggctgagatcgcaccactgcactaaagcctgggcaacagaggaagactctgtctaaaaatatacatatatacatacataggtgtgtgtgtatatatatatacatatatacacacatatacatgaggttcatatcaatcacaagaaagagcttaccatcttcaatggcatttttgatagcacgaagtccatctcttatggcatccttgacttgtgtgagagtatgcttatttggtcctttaaccaacaaggtaacagagcaagggttaacacactcctcaataaaagtgaacttttcttcaccctaaagggtggcacaaaaatatataactttaatatttgatgtcattataaaatcaacaatttatactagaatacaatcttcatttgaatttttcttatcaagcataactaagggagttaagttatatctgaactcttaacaaacatttaggtaaataaactgtaaaatctgttctgtgaattagatctcaaaacacaaaacatgaaataaaaggtcaagtagtatttttctttaaaaaagggggcttagtattcactttataaccactgttcatagaaatactcactaatgtatactcatacacaagaccagcatgtcccaagcaatctacagtgagatcttcaaaagaattcacggccattccaccacaagcaagagagagtctgaaattacatatatgtcaccatagcttgattatggagaacattaatactaatttctcagagagaagatatctaatgcagaagactgtattgttactgtattgtattgttttgggtttttaattgtctaataaaattgtctatatttatcgagtacaacatgatgatgtttttaaatatgtatacactgtggaatggctaaattgagctaattaacatacatattgcctatgtgaggcttgatttagccatttgtgtgataagaacacttaaaatctactctcagcatttttcaagaatccaacacattgtgcattctcgggtgggtttgcaaaagatttttaaaaagaacaatatattgttattaactacagttgccatgttggacaatagatctcttgaatttattcctcctaactaactgaaattttgtatcctttgacccacatattcccagtgcccctcccctcccactgccccagcccctggtaaccgccattctactatctacttctatgagttcaacttttttagattccatatataaaagtgagatcatgctgtattatgttgtattgttttgtttttaaaatctgttttaaaaagataaaaactttccttatacttcaacaaagttctgcagtaggttaacaaccttgctttttgacagttcaattatttactgaaactaaaaacaaaatttggatttttttatgccactgttttgttcaacaacatttacacataagctaaaaggaaaacacatgggatagtttccatttactctgttaaaaacttaggatatataattatctgcaagcttacctttccatatttcttctttttgctctgcgaagagctactattccatgttttgcaagagaatctaaggaaaatggatcaattccctataatcaaattaacataaaaattataaacatgttttaaaccagtatttctcaaaccttttggtctcagcaccactttactctcttaaaaatgattaagcacccaaaaagcttttgtttatgtaagctctatctataatatttgtattataaaaactgagaaatttttaaaatatttattaattcatttaaataataagcccattttatgttaatacacataacattttaaatgaaaatttactacacttttgaaaacaaaaatatatatagtgagctagcagtggcattactttacatttttgcaaatctcttcaatgtttatcttcatagaaaacaaatggattctcatatctcattcagtattcaatttggaatgatatgttattttggttcaagtttatgaagaaaatctggccccacacagataaatattgtaaagggagtaatattttaataggcttttcagataattatggaaattcttctttgatactataccaaaactcagtaagtaatagtttctcaaaggttagtttcactatggaaccatagcaatgaacttttcatactatctcacattaaaacacattgctgtaacttgcacactgaatggattatttatccatgtatgattttataaaaatcatgcatttttagtcatgtagatagcatcagttcactgagttaggcaaagtttccacatgttgacacatttcatatataaaatgttgtgttatacatgtagaaactgtgtcatgttatgcatgtggaaactttgcctatctcagtgaacaaaaactcacatttgttaatatcactactattatcaggaaagtcttttaagtattggaaagctgtcaagttcacatggcagatacaagttttctgaaattctaattttttaaaaaagttcaaatgttattgacaacaaatactgtcagttgttttaagtcacagaatttcctcattcatttttgagagaaatctaccaaatacccatatctagataaccacagtttgtctgtcagtcattcttccaggtaaaagtggcattccatgaaaaagtggctagtttaccttgcaatttaaacaattacacaagtgctctccttcaagacaaccatcatattttggtatgcaatagaagagctttgaagttcccagccccataatcccaacactttgggaggccaagccaagaggatcacttgagaccagcctgcacaacatggcaatacccagcctctacgaaaaaacttaaaaattagccaggcatggtgatgcacacctgtagtcctggctacttgggaagctgaggtggaaagatcacttgggcccaggaggtcaacgctgtagtgagctatgatggtgccacccaagcactccagcttggatgacagaacaagaccctgtctcaaaagaaaaaaaaaaaacagtgctttgtgcatacttcatattttgtcacacataataataaaaggatgcatatttcagaatcaaaatttaataaattaataagttttaccacttcatcaagacactcttaaatgatactgccttttttttttttcactgtaagtttgcagtggtatagcaataaagaatgcgatgactactagtatagtttggtgctacttctttgacttgtactaaggtgccagcagttttacagattgcttttgcagcatcattgcaaatgtcaacacaatgtaaaaggtgtaattattattatgaaaatagtttttgacctcacagactctctgaaaaagtcttagggattcttaggggtccacagaccacacttcaagaaatgcttaagaacatttacaaataactaaaatctaaactttctttctcaccttttgattaatgacgacaaatcctttatttgactgagcacagactttgtccttcaggtctattattttttgtactctatcttcaataaattttctttcagcttttaccaatttctctttctcttctgcagtcttataaaagaaaccagagttcacctctctaaaagattaataaaaaccagctagtaaaggcaggaggaaaaaggaaaaaagatagaagtagtctacaccaaacatctggaaggaaaaagagattttaaaacacctttagaaaaaaaaattcaaaagttataaagagaaagtaacacgcacgttttttcatattccagtgaaacgttgcaaataaggataaatgcatcttctactcgcttcttcatatctggatgacgggcaccatgatccaaaactaatccttggatcaacctattaaaaatattaatgtttcttactttgaatatatactctaaaatttggtataaaattatcattgtactattaaagttacatcaatacttccaggacacacattgtttccttgtaccaattttaacagtttttggtgtttttgttttttgttttcagagatgggggtcttgctatgatgtccaggctggccacgaactcctgggctcaagcaatcctcctgcctcagcctcccaagtagctgggactaaaggagtgcaccacctcacccacctccttgcattgactttaaacctaacatataattagtaaaattaggaaagagaatctactttaacacagtgtgactatgaagtcacaataaaaagtcaagccagaattattttctaagttatgtgattcaaaaatatgacacagcttatcaagtaatgaaaggtacgtatacaatgagtttcttaggaacatttattcaaaatgattatatggaacaactaaaaattgttaacctaaatgtccaacaatagggtattattcagcaaataatgacccaactatttgatggttataaaaagtatgtaataacatggaaaaatatttatagggctagctgataagcatagaatgacaaattgcatatgaagcatgcctataactgttctttttaacaacagacaaggaaggggaacatcacacaccggggcctgttgtggggtgggggaagcggggagggatagcattaggagatatacctaatgttaaatgatgagttaatgggtgcagcacaccaacatggcacaagtatacatatgtaacaaacctgcacgttgtgcacatgtactctaaaacttaaagtataataaaaaatataaataaataaataaatttaaaaaaaaaaacaacttggcattaaaaagaaaaaaaatgggagggacctaagagtaggggttatgcctgggtagtaggaatatagatgatttggaaaggaggtgtttcttcctgttttccaaataatctttcaagagtcaatatttttataactttataaaattcatttacaaaacattcaggggatggaatttctacttatgaatcctttataactaatttttgttatatatttttaaactattttagttcaacataattataaggaagttttcaaaattttactttaactagattactccacctcttaacagaatgtaaacatatctagaaacaataacactatgttcaacattcctcactcttcaagcctccttcactttcctccctccctactgtcagcaaatgacattgtttctttgagaaaatagaaacattgtcccattactacctctaccaatccacttgcacttgaccctgaacctcctactactatgaatgagctgtccatgttcctctctatgggtagcctctctacttgtgtactggattccatttccctctctgttcttgcactgtcccctagtcccctatatcaattctcacctaaagaaccatccttaccagcatacaaacttgcagtaacaattcctatcattaatacaaaaaatccttctccctcagccccattcccatattcccttctagctactgccccatttctctgttctccttcataactacacttctctcagttaccattctctcttgagccaccttcaatctgacttttatttccacctctttattcaatcagctctcattaaagccactaaaaaagtaaatgttttccagccaggcgcggcggctcacgcctgtaatcccagcactttgggaggccgaggcaggcggatcatgaggtcaggagatcgagaccatcctggctaacacggtgaaaccccatctctactaaaaatacaaaaaattagtcgggcctggtggcaggcacctgtagtcccagctacttgggaggctgaggcaggagaatggcgtaagcccagaaggcagagcttgcagtgagccgcgatcgcgccactggactccagcctgggcgacagagcgagactccgtctcaaaaaagaaaaaaaaagtaaatgttttccaaatataacaatcaactctcagttcacggcaatgtactcaaactttcagcagcatatgacacagctgattattgtctccttgaaagactttcttcctttggcttctgggacaccactctcccttggctttaatgcctccttgactgcccccttctcactcccttttgctgaatccacctcatcttttcaaactctaaacatccaagttcctagggatcatgctttaaacttcctttactatattcacttcccagatggtctcattaactcatggctttaagtcatttatacactaatgattctcaaatacatacttctagtgcagacctctattctgaattcgagacacatctctccaaattcctaatcaacatctccatatggatgcctaataggcatctcaaacataacattcccaaactgaactcttgatttatctccccaaatctgctcctcctagtcttctccatctcaagaaacagcacctccacttttcctgctgatcatgaaaaagcccaagagatatctctgaccgctctatttctgtcatgtcctatgttgaaccctcaacaaatcctattgccctttccttctaagtacatcctaatccaaaccattttcatttctcacttgtagtataccaacattcctaactggtctctggtttctgcctttggccctcttttatctcccaatcagccgttttgtgtgtattccccacacaaaaaccacagataaccttctgaagtataaatcaagaacttgttatcctcagcaatagtaggctaactgagatcagtcctactatcaaaaacaactaaacatgctggcttaaaagcaaaaaaaccttagcaacattgaagagctataagatagtatataatcacaaggccaaaactgaaataaaacagaaactccaacaggtaagtagagaactgcaggatcagtaggttcttttatcttaaagtcatttgacaatccaggcaaatctgaacttcggtttcaatgtcttcacaatgagaagaaaacagaatgaaaagcacagagctcatccaaggtggagtgtttacaggagaccctcttcacattaagttggaaccacaaagggctacatactcaggattatccagaaggaagagctagaaataatcagccctcacatggacttacaatcggaattcatatcaaatggatattcccaaaaacctaagctgtgaatttaatttaaattagtccctagggaggcaacaaatgcaaatcctctctgcagaaaggcagcttcattctaggtctcaaattatttctaccaatacgtttttcaagcacaatgaatggcacatatgaacacaaagcatgatgagtgagaaccagtaaaatataataaacaccagaaagggacaagtcaaaactttagatattataattatcaaacatgaacatattaaacatatgtttaaagaaagaaaaaagggcaagtttggaaagatttgcaaggaatagaacaccataaaaggtaacgtggcagatttaagaaagaaccaaatagaacttctataaatagtaaataaggatatccacacatatacacacagatataaaaaattcaagaaaacaacagacataaatccatatgtctaataaaagaatattacaatgtttatagcagcactattaataatgggcaaaaaatgcaaactacctaaatgccaatgaacagcagaatgaataaactgtggtatattaacacaagaaaatactaaatagcaaagagaatgaccaatctactaatcacacaaaaatacaaatgagtctcacaaacaatgctaaatgaaaaaggtcagaaacaaagagtacctaccttatgattccttatacaagtacaaaacatataacaatctatgccgcagaaattcagactactctagaagaaatatggctgaaaggaagcaaaagaggggcttttaaggtactagtagttctgtttcttgtgagagtgctgattacacagatacatttggaaaattaatcaagtcatattgctatgatagttgcatttttcagtgtgtgttacacttcattagaaagtttatttttaaatcaagggactggttttaaagtagagtagacattgtttaagagaaaattagcaaacaacaaaatatatcactagaaattatccagaatgcaacacgaaagacagcaagacaaaaagtacataaaaaactaaattaagaacatcaagcatacatttaactggagaaggagaagaagggatgaacaaaagaaatgtttaaacagataatggatggaaattttccagaatcagataaacgatagcactcaaaaagccagaaaatgccaaccagaataaacaaaaagaaatccatacctagctacatcatagtaaaagtatacaacaccaaagacaaagagaaatatcttaacatcacctaggtaaataaaggactcatggctataaaggactcatggctaatttctgtacagcaataatgaaagctagaaagcaacagaacaatatcttcaatcagctgaaagaaactaactgccaacctagtaaacacacaatgaaagtatcaaagaataaagataaaggcattttcaggcaaagaaaaactgaaagtatgcctccaacaaactatcactaaggaaaatctacaggatgaactttaggcagaagaaaaggaatcccaaatggaaggctgagatgcaaaaagctacacagatggctgggcgcggtggctcacacctgtaatcccagcactttgggaggccaaggtaggtggattgcttgatgtcaggagttcaaaaccagcctggccaacatggtgaaaccacgtctctactaaaatacaaaaaattagatgggtgtggtggtgcacgcctgtagtcccagctactcggaaggctgagggaatcacttgaacctggcaagcggaagttgcagtgagccgagatcaagccactgcactccagcctggtgacagagtgacactccgtctcaaaaaaaaaaaaaaaagaaaaagaagtaaggctaagtagaaagtataaaacaagatggcaaactttttaatttgctttttttattgtaatagctttttggggaacaggtggtgtttggttacatgactaagttctttagtggtgatttcttagatttcggtgcacccatcacccaagcagtgtacactctacccaatgtgtagtcttttatccctcatccttctcccacccttccccccggggtccccaaagtccactgttaagatgttaaattttaaatcaaatatatccataactgtattaaatataaaggattaaatgctcctgttaataaagagtatcagatttaatattttaatctacctatatgacacaaaaaatcatgtaaagagagaaagactgaaagtaaaaacatacacaaagatatgacaggcaaatactaattaaaagaaaactgggccgggcacagtggctcatgcctgtaatcccagcactttgggaggccgaggagggtggatcacttgaggtcaggagtttgagaccagcctgaccaacatggtgaaactccatctctactaaaaatacaaaattagctgaatgttttggcacatgcccgcaataccagctacttgggaggctaaggcaggggaatcacttgaacccaggaggcagagattgcagtgagccaagatcacgccattgcactccagcctgggtaacaagagtgaaactccatctaaaaaaaaaaaaaaaaacaaaacaaaactggatggacctggcatggtggctcattctgttctgtaatcacagcactttgggaggccaagcaggtggatccctccagctcaggaatttgagaccagcctgggcaacatggcaaaaccctgtcttgacaaaaaaaatataaaaattagccagacatggtggcgcatatctgtagtcccagctactcaagaggctaaggtgggaggatcacttgagcccaggtggtcaaggctgcagtgagctgtaattgtgccactgccctctagcctgggtgacagagcaagaccctgtctcagaaaaaaaagaaaggaacggaaaggaagggaagggggaggggaggggaggggaggggagggaaaagaaaagagaaaagaaaagaaaaggagaaaagcatagaaaagaaaaggagaaaatcatagaaaagaaaagaaaaggccgagcacggtggctcatgcctacaatcccagcactttgggaggcagaggtgggcggatcgcctgaggtcgggagttcaagaccagccggaccaacatggagaaaccccatctctactaaaaaaaaaatacaaaattagctgggcacgatggcgcatgcctataatcccagctactagggaggccgaggcagaagaattgcttgaacctgggaggcagaggttgcggtgagtcgagatcacaccattgcactacagcctaggcaacaagagagaaacaccatctcaaaaaaaaaaaaagaaaggaaaggaaagggagggagggaagaaggaaggagggagggagggagggaaaggaaggaaggaaggcaggaaggaaggaagctagctagctggtacaacagcttttaacatgtaaagattttttaaatataattatcaatatcagataaattatacttttaaagacattactagaaaaaagtcacttcatatcagtacaaaagttcaatgcaccagaaaatatgtaacagtttaaaaactatgcatctaaaaagattgtctcaagatatataaagcaaaactctcaaaactaaagtaaaatataaacaggtacaaaataatattgaaagatatttatacatttcactcagtaattgacagaataagcagtcaaaacatcaataaggatatagaagttctgaacaacaggattaacaggataccttgatcttaatggacatgtatataaaattgtacctaccaactgcagcatacattcttttcaagtacatgaaacattaacataacaaaagctgactatacactgagccataaagcaagtgtcaacaaatttcaaaggagcaaaaatctcatagagcatattctctgaccacaatgtaattaagctaggtatcagtaataagataactaaaatttccccatgttaagaaacacacttctagttgaaattagaaaatattttaaactgaataaaaatcataagattacatatcaaaacttgaaggatgcagctgaatagtactttgagaaaaatttaaggtcttaagtactgtattcaaaagcaggagactgaaaattaataacctaagtagctatcacaataaaacagaagcagcaaaaaagtccccacaaaattccaaaaaagtaaattaaataataaagagaaagacactgtgaaatgaaaacaaacctctgggaaaaaattatcacaacaaggaaagaaaggcataaataacaccagaaataaatggtgataccactacagatcctgcaaacaggatccttataaaaattttatgccagtaaggatatttatgaacactttataccaaaaatttcagagttaaacaaaatggacaaatttctaagaaaacattacttaccaaaatgattcaaaaaataagtagaaaacctaattagtcctatagccattaagaaaattgcatgagtggggccgggcgtggtggctcacgcctttaatcccagcactttggaaggccgaggcgggtggatcacaaggtgaggagttcgagaccagcctggccaacatggtgaaaccccgtctctactaaaatacaaaaaattaggcaggcgtggtgccacacacctgtagtcccagctactcagaaggctgaggcaggggaatcacttgaacccagtaggcggaggttgcagtgagccaagatcacgccattgcactccagcctgggggacagagtgagactccatctcaaaaaaaaaaaaaagaagaagaagaagaagaaaattgcatgagtaatcaaaaatcttcccacaaaaactcttcaagacaaataatcagacttttccaaaataattatcaaggtgaaaaacaatgagaggaagaaagaacctacaaattaacaaattaacagagactaaaagagatatcacctaagtgcactatacagactgtgcgtagatcttaatccaaacaaaactgaaaaaaatctgagacaactgttagacaaattagactataaactggaaatgtgatagtattaatgagttattcatttttaaggtgttataatgttttgtggatatattaggtaaaagcagggggtttatgttttatggattatatgatatttacaggtggtatatgatgtctggatttgcttcaaaataatcctaggtgggagggggaaagagggaagggtatgcttcatatgttagaaattgataaagatagctaacagttatgtggaaattccctattctgttctctctatatatgttcacagttttctataatacaaagttttaaaagagtaaatccaaaatcaacatggtactccataatctggtcccttttgcctcacctcctctccctgtgctccaggcacactgtaacaacctagtcacacttctgcctcaggaccctttcagaggtcattccttctgcttagaaccctcttattccagatgtgcacatggctagctcccttgtttcttcagagacctcttagctctccaggttcttatcagagtagtcttccctgtccactataaaatcacacacatgattttttttctatttcaattagaaacataaacttcttggggaaagaaattctgttctgtttactctcattcccattacctagagcagtgacttaatatatggtgaatgaatatatttatgttgaataaaagtaagtaatgaatttaataaaagaatatctttaaaaaattctagaacccatatgttgtcaaagcttatgtaatttactttgtatctgttcctaatttatgcttcatctccattatttctaccatgaagagatcaatagggtaacctggtcttctaacagccaaaacagaatccaccacaacctgaaagagaaatgaatgagaacagttaagttatttggactactaaaataaaccaagggcccaaacaatctatcaccagactaaggagataaaagccttcaggattcaaaacctagggcaagaccaatatgtgccactttactatggatgctaacaatagccaatgccaacagacactttagagtctaaagaaacttcagagatcattaggtccaaaccttttattttacagataaggcaactgagataagaccttaagaagtcacagtttttaaataagatctaacagctagtaacagggccgggactagaattcagggctccctaactgcccagcgactactctttctatcataccaagactatccaaacttttccaccaaaggacaccttaatggaaaagaaggaaaggtaatctaaggtaatagctccaatttgctggctgtaataacaggaaacgttaaagtctcatgttttatcgtgaaaagtttccatgtcatcccataatatgtttatctcaatgtaaaaataatgttttcccccaaaattgtaaagtaaaattgacactccagaaagctacgtctcatttattctgtcacatatgaccagggatatacaatttaagaagcatagcacaacacgtcttattgcttagctcagaaaatgatataaaaataataaataactgcagaaattaagggctaagttataactaccctaaaatatacataaagcagaaaaaactgtatcttagaaaactttgcctgaggtgacataatattttattttagaggcaaataagaaataggacaaaggccattggatagtgagaatatcactgtttctgtaactctaaaacagaatgggtgccctagcagcatgaagatttggggccattcaagtactctaacagcagaaaacacagcagagcctttcttctgactctgctcatcaagaaattgtctgatcttaatctgatttcccaagttgtttttttttaacggtaaggagaatcgatcagaaacaactcaagtattccagtacatttggcatttgtagttctcaaagtaaattattaaggtagtattctgctttgtatgtcaatgtcttgtgaatttgtttcctaagaatttatcattcttcctggtaaacaaatatattcaagtttcagaaattacaaagctgaaaaacaataatgatatcaaatcattgccacctgataaaagccttcccaaaatatccagccaatcttgtctttatataaaatatatatatatatatatatatatttttttgagacaaagtttcactctgtcacccaggctagagtgcaatggcatgatgtcagctcactgcaacctccccctccctcccagagtgattctcctgccttagcctcccaagtagctgggattacaggtgcctgctaacatgcccagctaatttttgtattttgagtacagacaggatttcaccatgttggccaggctggtctcaaactcctgacctcaggtcgtctccccacctcggcctcctaaagtgctgggattacaagcatgagccaccatgcccagcctatataacatatattctacctttagaaataaacaaaacactggccagatgtggtgacttcatgcctgtaatcccagcactttggaagcccgaggtgggtgtatcatttgaggtcaggagttcaagacaagctttggtaacatagtgagaccccatctctactaaaaatacagaaattagccaggcgtggtggcacgcgcctgtaatcccagctactcgggaggctgatgtaggagaatcgtttgaacctgggagacgggggttgcagtgagctgagatcatgacactgcactccagcctgagtgacagagtaagactctgtctcaaataaattaataaaagaaataaactaaacaaacatacatttccaatatgtgaatattaatatattaatatatcatatcacatttcattatattggtaaccttatctacaaggtacactgctaaaacaactatcttgtgtgtcacctcacataataaaatatggactgctagatttaaaaagaccagtatactattcaagagcttccacaggagatgatctgcaggcagccaaacctctcccacctttcaagtcacgtttaaaaaaaggcctagtatgatacttctgaaaattacaaatactgttctgaccagtcaaatctaatctacagttaggcctatacaataattgtctgtcttccatattttatgcccaaaaaaccacatgaaatacttgattatcttacagaaaaagaaaaatatcaccatgcattaggctatatttgttctgaatgcaaaagtttaataacatacctctgttaagacatcagccagttcagcatgaactttagtttgtaatgatgttctagctacatctaagaggatttttcttttcatctcctttgtcactttaacttcctccaaaacttcaagtgcttttatctttgcagcttcaaatccttcagctattattctagggtgcaggccctgttacatcaacataaaattataaattataaaataagtcacccaatgtaaaagtaaccaacctgtctgattattatgttcaaaaaaagttactcacattaatgccatgaaatataagtgtacataatttataaaagtcattttagtgcttcatacttgaaataatctcaaccttaacagtaaggcttcaagtctagtattaaaaattacagaagtcctttttatttccaaaaattatgactacattgttgttatgtggtgcccttctgaatgggcacacataaaaagattcctttcaatgcagaggaaaagaaccaccactgaattggggaaaagtggcagatagaacactgtggtgtctaccacttcaccaagtgatcaaagttaacatcacaataatgagacagacaggcatcacatgcctgctgacatgatgcattcagtagaacacaacagttctatggtattttggccaacaatctgtaacctaagtttaattgaggaaataggcaaatccacactgagggactttctacaaaataaatggcttaaaagtagcaatatcatgaagcataaaaggcagctcaggaactagtctagcttaaaggatactaaaggaacacgacaactgagtgcaatgcatgaacttagatcttttttttctataaagagcactattaatataagtggtgaagtttgaatagaatgcagattagataacagtaatgtatcaatgtgttaatgttattattaatttcctggtttttataactatactgcaattatataattccctggttttaagaaatatacactgaaatatttagatcatgtctgcaacatacagtttagaaaagaataagtacactgatactaaggaagagaacagggcaagcaggcaatgagagaaatgaaaatgcttgaagaatctgggtaaaaagtatacaggaattctttgtagtatgtttgcaacttttctataggtctaaaattatgaaaaaatattttaatagtattttttgttccataaaataatacacaaactttgtgaaagctagcacttggtctaattcattcccttactacttttctttacatcaatccttaataatctttaaaagttgacattgagtatttgtgctggacatgactaagagttttacacaagttatttaattctctagccacatcatgaagtgggtattattattattatttttcctatttcacagatgagaagaccgaggcttaaagggataatgtaatttgccttagatcaccaagataataagaagtgaaaccaggttgtttaaacccatgagacctgactttagagcctatgttattaaccattttcaaaaatgtcttcaagctaggaccccacaatctctcatccagactatcatgaaaacctctggtctagactcccttaaaaccatcccccaaatacttaaaatgccaacctgaccatatcagtcattagtatgtttctatgtttggtctgtaataccactggatgaaatctaagcttcttggttagcatactacatgccctctgatctggctcccacttccctctccagcctcttctccactactgttcacatcacctgaaattccagcaacaccaaaatgcttgtagcttcatacaacaccatgttgcttgtcttctctgtgactttgcttatgttgttccttctgcctggaaagccattctcctcaccccttgctcttttgtctggttcactcctcctcatcctgaagatttaggccaggccttacttcctccagagagttcttcctgactacttcaggctagtttaggacgtccctccagcctcagtgattccatcatatactgtgcccggctctatcactgcaccaccacagagtttcataatgtctgttagcatctcacccttgccaaactcctttcttcctaacccaaccctaattcagtttgggtttccctctcccacttgtgctttggagaaagctgatcttatccccagctcaaggagtggatcctgattagtctaagtcaattcccataaaaactgttactggcttgggatggacataatactaaagttggcccaatcatactaaagaaaagcctcctgaatggctttatcttgccctctgcctaatttcctctgacagtctttcttcgctctcctctgtcctctctctcctctctcctctcttctctctctctctttcttttagagactgggtctcactctgtcacccaggctggagtacactggtgcaatcatggcttactgcggcctccacctcctgggttcaggcaatcctcctgcctcagcctcccaagtagccaggaccacatgcagcatgccaccaagcctaatttttttttattatttctaaagacagggtctcactatgttgcccaggctggtctcaaattcctgggctcaagtgatcctcctgcctcagcctcccaaagtgctgggattacaagcatgagccactgtgcccagccagtcttactttctttttctttcctttttctttccattttttttttttttttttgagatggagtttcactcttgttgcccaggctagagtatgatggcacaatcttggctcactgcaatctccacctcctgggttcaagcaattctcctgcctcagcctcctgagtagctgggatcacaggcgtgcaccaacacgcctggctaattttgtatttttagcagagacagggtttctccacgttggtcaggctggtctcgaactcccgacctcaggtgatccacctgcctcggcctcccaaagtgctgggattacaggtgtgagccaccgcacctggcctcttactttcaagatggaaatactcttaggatgaaacagcactgtgagtggaagaggtaagagacaaagaacctgtgtacttgatgactgaattttgttatcacacaacctgacagtctcccttatctctcaattttctattatgggagataatcatttccttattgttcaagtgagttttagtcaagttgtttacagccaaaagcatcctaagttgcaagtactgaattaatagaaaattcccaatactaaacgaaacacagagaatcattttgactaggttactctttgctgaaatggtccctgaaagagagaaaacattcagatatggagaaaagagatacttaattagagaaaggtaaaaatgtacatgatgttttcagaggccagtgaacggaggagtctggctgaagtagatgatttataaagaaaatgaaactagaaaggaaggtaaattcacaataagtaaaaccttcaataatttttctccagtggttttataaaggtgcataatttggtttcaactttatctatggtgttttctttcttaattacccatggatacatgggtaattttttacttttttaggtccgttaaatatttcatttttaaaagaggtatataattccaacgaaaggcattattttggccaacaaagttcattattatttccatttataattgtccaagaatatcttaattaaaattaactgtctagaccaggcacggtggctcatgcctgtaatcccagcactctgggaggcccaggcaggtggatcacctgaggtcaggagctcaagaccaggctggccatgatggtgaaaccctgtctctaaaaaaaatacaaacattagccaggcatgatggcgcatgcctgtaatcccagctactcgggaagctgaagcaggagaattgattgaacctgggaggcggaggttgcagtgagccaagattctgccactgcactccagcctgggcgacacagtgagactccatctcaaaattaattaattaattaattaaaacaaaattaactgtctaaaactcaaccattttactagttaaaaaaataatttgccattcaaaataacatataaactgtgaaattctaatacctcagaaatgtacaggtcagcttgttttaataactctccaataattagaacatttgaagtagtaccatctcctgtgacgtcatcctgagctgttgctacttttgctatcaaggaagctgttggatgttgaatttgctggaaaaagcaagcaacagatttaaaaagacaggatgagataaggaagtaggtcaccaaaagcaagataacctaggggtcagtagcaaaattaaaaaatgaaataagcttcattctacaagtttacaagttttgtattatcaatacctaaatgtcaagtccaaaattttaaaagtgacaggtaatgaggcctgaacatttcataaaagtctttgcttcagaatgcaatgacatttctaaaataagattaaatcattcaatctcaaaatgaatacatgtattaaacttgcaaaggatatttttatttttccataattacaaagaacataaggcagtgcccttaaaagatattattgatttataagtatgcctaagtatacaaagtatgtataagtatacaaagacttggaaacagccaaaaaaaaaaactttttttttttttttttttgagacagggtttcactctgccactcaggctggagtgcaatggcacaatctcattcactgcagccttggcctcctgggctcaagtgatcctctcacctcagcctccagagtagctgggactataggcgtatgtcaccacactgagcaaaatttttttttttttttttttttgtagagacggttttcaccatgttgcccagcctggtcttgaactcctgggctcaagcaatttggccacctcagcctcccaaagtgttgggattacaggagtgagctaccacacccggccaaaaaaatttttttattgaggtctaattcaacagtcttcagcatatctcaagactgcagtatttagctcacagccttggcttaaagatacacaagttctactatgcttctaattaaggcttattaaggtttattaaagtcagcagcatcagctcaccatctcatcgagcagcacattgccatctttggtgagtttgatgtcacctgcaccagaaacaagcctgttcagagaagaatgatattaacttcatgtggtaggaagacattcccagtgcttgccactccattatccttaatagagggaactgggctcggaaaacttccactgtaccatgggaatatgccatggtaattaccaccatttgcagctcacagaatcatttctccccagatggacagattatggagatttcattccaaatggactatttacaggtttaaagataaaagcacttgatgagttacgaactgtggtttggtcaaagaatacttggaagtctacaaagcacaaattcgcaaatttcctgcaggttttaattttggtgaatgttttcattcattcagtcactcaacttagtttccctcatccctgcatttattagatcaccaagttctatcaattctactacctaaatatctcttgaatctgccaccttctctccatctccactgttatcatctctactttggatggcatccggatatctccaaacttaaatataccctccacacatttttctttctaaaaggcaacgtgattcagtcagttccctgatcaaaagtcctccaatgatttttatgttttccatcattttcaagttaaaatccaaacacagcaatgacatacttgacctttcccaatatcttccctgcctcatctacttttccacaagcaaatcttctggttcccttaatataccatgttttgtttcgtttctgttggatttgcaccattggtctttcttattcctgaaattactttgcccaggcctttactccctcttccaactagtgaagtcttattcttctttcaagactgatcaaacatgttacttaagatgcttttccttctgccatcagtccctttcttcagcataattatatgcatctatatataattagcacatcctactctaccacatccgtctctaccacatctccttaagaacagaaaccgttatcttgatcatttctgtgtcccaacaactggtacctaagtgacttattttaccattaatattattttgttcattactatgaggatgtgtctctcctcttatacccttttgccctcactggtctcttttcctcactcttgtctatagaaaagggtgcttaatatatactgaaaagatgaatagatctgaacaaccatagacacggggtattcaagtagaacttggatttgaccccatgccttcctggctccaaagcctgtgtcctctccactacaatacattgccatacaaaaaacaaaactacttgttgaatttatggaccaagggtatacagtcttaaggagcagaggagttaaatgctttgtttccaatgagacactaaattaactgactttctaactgcatatgaaccttgacgacaagtcgggggtcggggaagcgccacagcttcactcccggggccctctactaggggaggcttttctcctccacctgcaccaggcgagaaatacccccagagcagggatgagaatgagggaaatcaagctcgcaagaacatccacagcgctacgcggacgcctgcctcagagggcgacaggacaccaacgggcccctagccgcgtaatggccgctccaaccgctgtctcacattttcatggtgcctttaggacccaagttggtccgcagcacatcctgcagccctcgggcggcgcatatattgacagccaaagctgcccgggcccgcgccacctcagccttggagttgacggcctttatcgcagccatagcctaaccgttcagagggagaaaaaaaaaaagccttagtcgcgattctgagcaaaaacggcaatgcgacgccacgctctcttgagcctcggccaatcatcgcccttacaggaagtgacgttatcatgcctcgcccgacggaaaccagaatcgttttgggtctggtcgccaagatggcgtcctccgcctccgcccggactccggcagggaagcgagtgataaatcaggaagaattgcggcggttaatgaaggagaagcagcgtctgagcaccagtcggaaacggatagaatctccattcgcgaagtacaaccgtttggggcagctgagttgtgccctgtgtaacactccggttaagagcgagctcctgtggcagactcacgtcctgggaaagcagcaccgagagaaagtggccgagctgaaaggcgcgaaggaagccagccagggttcgtccgccagttcagcgcctcattccgtcaagaggaaagcgccggacgcagacgaccaagatgtcaagagagcgaaggccaccttggtgcctcaggtacagccctccacatctgcgtggaccaccaactttgacaaaataggaaaggagttcattagagcgactcccagtaagccttcaggactcagtttactccccgattatgaagatgaggaggaggaggaagaggaggaggaaggagatggagaaagaaaaaggggggacgccagcaagccgctctccgacgcacagggcaaggagcactcagtttcctcttcacgggaggtaacaagtagtgtgctgccaaacgatttctttagtactaatcctcccaaggcccccataattcctcattcagggtcaattgagaaagcagaaatacatgaaaaagtggtggaaaggagagaaaacaccgcggaagcgttaccggaaggtttttttgacgaccctgaggtagatgcaagagtacgaaaggttgatgctccaaaagatcagatggacaaagagtgggacgaattccaaaaagccatgaggcaggtcaacactatttccgaagccatagttgccgaagaggatgaggagggacggttggaccgccagattggggagatcgatgagcagatagagtgttaccgacgggtggaaaagctacggaatcgccaggatgaaataaaaaataaacttaaagaaatcctgaccataaaagaactgcagaaaaaggaagaagagaatgctgacagcgatgatgagggggaactacaggatttgttgtctcaggattggagggtgaaaggggcattgttatagggttttaaagacccaaggtttctaacagcctctgctgttgtataaaaagtgctgtctctcagtagtatagcggttacttcatgcctcaagatttgggtacctggattgctaaactggattgttgagataaaatgagccagtgagctacagcactttggaaaatttgtgtaacatgtttttgaggtaaagttgtttttgaaatttctgaagtgttatataccaaaatgccaacatttccacgacagacttaactgtataatttcgttgtaaaatctgtaagttgtaaatattgtacatagttaaatctgtattctgttttgaatttttttaattaatagaaagaccaaccggcaaactttcagatgaatgcttactgtggtatttggaatgtatgtatcttctgaaccctacatcaagttgaaaaggtttgttttcttgtttctttggtttttgtatggttttttagaacacttcataaacacataagtcattgtaggttaatcagttctcttagtgtgctttattttaaaaacataagaaaactatatgccaaacatgaccaaaccaatgatggtcagatgtggttgcacatgagagtcacctatgaagcattaaaataattaaagtgtctgaggccttccccttcaataaatctgggattgggcccaggcaactgtgttttttaagcacccaggttattctaatatatgccagggttagagagtaactgccctaaatccagaacccatttatgtttttcaggttttttctttttctttaaataacacattccataaatttgctgtttcttgaatgaaggaaaaaatattatcttttatttatttcatccagccttaaattttgttatttggtggtaaattagggttccttgtttgcaggtcctatctattgtagaaagaatatttaagttgtctttccagcagtaacaattggctcttgctggtcattgatagtttaaatcactccttcctttagagattgaggtactcaaataggaaaagggaattagcagtgttctggagttgaaatgcatacagcatattcaaataaaagtgagcaataataataatagctaagacctatatatttcttagtatgggccaggcatggttctaagtgctttacatatattaactcaatctagtttccctaaagtctttttttatggagaggagtaccaagagacaaggtttgaaaagccttgaatgctaagtgaaaatttttgatgaagttcatatgaaaatggaggttttgagcaaagaattacatctgcaaagaagtatcatgggacattattaacagtatatagaatggaatgaacacggagggtagaaggaagctaggagctatttgaaaactatattttcaaaagcaaggtgacaagactgattagctgaggattgggagaaaaggaatagaagtgaaagcatgtcataggaatagctaaattcttttgttgtttgttttttttgtttgtttgttttgagacggagtctcggtctgtcgcccagtctggagtgcagtggcggaaactcggctcactgcaagctccacctcccaggttcacgccgttctcctgcttcagcctcgcgagtagccgggactacaggcacccgccaccacgccaagctaattttttgtattttttagtagagacggggtttcaccgtgttagccaggatggtctcaatctcccgacctcgtgatctgcccacctcggcctcccaaagtgctgggattacaggcgtgagccaccacgcccggccagaatagctaaattttagtgactagaagtggaagaagaaaaacaggagggataagtatgggattcaagattttgtttgtatttagtgtcactgcctaaaaggagttatctaacacttactgaacagttgctgtgtaccacaaattattattaataattgtcctgctgcctttggcagtcttcctccttgagctgctagctgatcagtgatagcagcttctatttgatgagacacggcttgcttgcctcaaatgtgtgaacccagtgttactcagaattttcccttcattcatcactattactctagcaagaaagtacaaatatgggtttgaatggtgggcccagtactgccttggccaacaatctagtggagtactgtccactaaagataaaatgcgactgggtgtggtggctcatgcctgtaatcctagcactttgggaatccgaggcaggtggatcacttgagctcagaagttcaagaccagcctgggcaacatggcaaaaccccatctctacaaaaaatataaacaaataatccaggtgtggcattcacctgtagtcccagctgcttgggatgctgaggtgggaggatcacctgtgccagggaaggtggcggttgcagtgagctgtgattgtgccactgcactccctcatgggtgacagtgtgaccctgtctcaaaaagtaaaaaaataaaatataatgcaagccatagataaattttacattttctagtagccaaagtaaaaagaagtgaaagtagttttaatgtgttttatttcatctatgtccagaatattaatgttccaatatgtaatatttaaagattgattatttttactacatttttgaaatctaggtgtatctaacagcacatctcagtttagactggccacacttcaagtactcgatagccatatgtgactagtggctactataaagaacagcgtagatctaaagagtaaggtatccaggtgaaaagataaacatgctcaggaggtagtgagcatccaatttaactagagcagagggttcagtcctggcaacagtgggaattatgattgaaaaggtagattaggaacatgtggaggagcttgaatgccaagctctaaggaatttgaactttctaagttaacaatttatccttgtaaattgagtccttaattgtaacacagtcaaagaagtgcttaagaagtgccaggtgtgtgttactactcacgtgaacccccgttgggcttttaggacggccaaaaagccctcaaaatctgattctcaatgctctgtattccggagcagtagaaatggggccctgaccataatcagtgctcaaatgaatccttgttgaatttgaggtcagcgtaagcagctatagtagctagtgcatctttcctgatccacttatacattggaaagctccattattatactttctctgagctaagtcaaataggtttcggcatttgactgaataccatcattgttcctaaattgtaagaattggtcccaaggactccctccagtcacttctctttttagaatgccccctaattcagccgtcatcacaatatagaagtgtaaaggctataaaggtatcctctcacccaacttcacttatcgatttaaatcaatacccctaacttgaaagaagaaaaaaaaatgctgatccaactagccttcaaatatatatgtgtccagtgccttacaattttcatttattgatggaagtaatgactgctttttacacaccaggggacaaaataggctatgaaattaaaattgcaggagaaaatgtaatttaggcctaagatctttaatagtaacaatcactagattagtgtgtagtaatgcaaagaaccatggaacagaagacttgcattcaagtttccactctactttttaatggttaatgagcttggccaagtcacgtctctgagcctcagtttgctccactataaaatgaagatatgtaattcctcacaggggtatggtgagagtccagcaagacatggactcattctgatgaacacagaatggaaggtcttaatggaaatagtgtatttcctgtcaagcaccaattggctagctgtttggctagatgttgtgccgggggtttgagtaagtattcataggaatgatgactagatagataaccttagactgctttttcaaactaatagtctattagcctgcataataccaggagtatagaagatttaaatttgaacaagggccgggctgggtggctcacgcctataatcccagcactttgggagaccgaggcaggcggatcacctgaggtcaggagtttgagaccagcctggccaacatatagtgaaaccccatctctactaaaaataagtaaataaatgaatacaaaaattaggtgggcatggcagtgcacgcctgtagtcccagctacttgggaagctgaggtgggagaatcgcttgaacccaggagtcagaggttgcagtgagctgagatcgcaccagtgtaccccagcctgggcgacaaagcaagactctgtctctcaaaagaaaaaacaaagtttgaacagggaaaaaaaaatctcagaactcctcgcattcaattttatatctacatttccttcctcagtgatctgatcccttcctatgggttttaatatcacctatgtagtgaagattcccaatttatacctccaaccttggccttccacctaagcttctggcttggctcagtacctacctaacattccacttcaaggtttaataggtgtccaaaatataataactctcaaacagagctttgattttcttctcaaacctgttctcaggtttactgagaacttgtctcagtaaactttactgagtaaattttactgagacttgtctcagtaaatggcaccactagccacccagacgctcaagacaaaccctgggggccatcattcattctctttcctttccctcaaatctaatgcactagttaagtcctgtccattccacctctaaaatatgcctaaaatctgtccacttctttctccactggccctagccaccaacatctcattcattgttgcctgtccccctaccctcatcacaatctattctgacagagtagtcagaatgatcttaaaattttagatcaagtcactctatcatttaaaaccattcattatatgcttccatcacactggggggcggggtggtaggcaagaaatccaagcccttattaagcccacatggtactcagggattgctaattcaaatgtctactacttacaaactgatgacagtaagctccattaaagtggcgtggaaggggacaggagagcataactgctctatgttgaaagcaattgttattcaggaataatggcctggcatagtgacatggccaatttgttttttgtgggtttttttttttgacggagtctcgttctgttgtgcagtggcacaatctcggctcactgcaacctccgcctcccgggttcacgccattctgcctcagcctcctgagtagctgggactacaggcgcctgccaccacgcctggctaatttttttgtatttttagtagagacagggtttcaccatgttaaccaggatggtctcatctcctgaccttgtgatccacttgcctcggactccctaagtgctgggattacaggcgtgagccaccacacccggcccaaattttttttttaacttaagagaaattgcaagtcaggattgttttttagtgaaatatcaaaaacactgtgggctgagtgtgatctgtgggcccccaccttgtgacatacctctctgacttcatctactacacatttccccttaattctctatgtcccagttcactggctagctttctagccatcagatgtgacatctcagggcttgtgcacttgtggttttctctgcttggaatgtgacttcagatagcatggcagtcttctcagtcattcagttctcagctctaaagtccctttctcagatggcataaacagccacccgtcactcacaatactttatgaattcactaaacttatcactatcttaagttagcttgtttatttgtatctaagttaacatctctccccaatagaatgtaaactccatgagagcagggattttgtctgtcttagttgcaacctaaaataatgtcagacacataatagagctcggtaaagacctgttgaatgaataccacccacatagctggaagttgcttgggaaagtggcagaaagatcaagctgactacagaaatcagaaccagcataaaagccagttagcagcttgaacagagggctgaggtacttttttccaactatgtgtcttccttacttctctggcacatgaagcctttacctattctgagcacacaacagggcaaggaggtatacacaacagcctctagggtgcaatgggccaccttcacagttagctgacaagaattcctcatggcaccaaataggcaaagagggacctccatatgtcagtgggagctcttgggcagccttgataccagaaggaggaaagttacccagtggcagggcaagatcacaaagccaacaagcactcactaacccccagccatgctcagccctcaccatttcatttggctcaccccttgtctcttggcagtcaaaacctttcagagtgcatctatgcactcagccatccttcactgtaagtacccccagtctctcagaggaggaaaccaggtccatctggctgcacctccattttgctagcagcatttgttgagcttcaagcacactgggaagccaagagtcatctttaggggaatgaggaggaccacacgaagtggttgatgatggtagtgtttgttgttttcattgttgtgtattgtttgtttgcttgttgttttgccaagtgtagttacaaggtagtatcaatcaagccagctgatcgggttattaataatagctaccattgactggatacctaccatatgggtggcactatgctagggtttggtatacaccatgtcacatcctcacaaccctgtaaagtatatgaaatcttcattttacagatgaggaagctgaggctctgaagtgaaacaacttactcaagacaacaatcccaaagcccttgttcttcccactattacactgcatcattattatttaatattaatatatacttgcatagagtattttttactcaccaactgatatggtttggctgtgtccccacccaaatctcatcttgaattcccacgtgttgtgggaggcacccagtgggaggtaactgaatcaagggggcaagtctttcctgtgctattctcgtgatactgaataagtctcaggagatctgatggttttaaagagaggagttcctctacacaagttctgtctctttgcctgctgctgtttacataagacatgacttgctcctccttgtcttccaccatgattgcgaggcctccccagccatgtggaactgtaagtccgttaaacctctttctttcgtaaattgcccagtctcgggtatgtttttatcggtagcatgagattggttttttttttatctcaccaccccccaccaaaagtgaaacaactattatcacttcattttagatgtctaatgacttgtccaaggtcactcagtaagttaatcactaagactagatgtaacttgatttcctagtccaatatattttctatatttaataataaaatgtgcaaaacatgacaggatccccaaaatagcaagaattaagatgagggaagtttgctgtcaaggttaaagcagtccagtgcttttcacaatcccttgctaggctgggaagtcctctttgttgcagggtgttatcctcagattttctccacacactcccacaatactctgccttaccctatttcgccagcaataaagtgtgtactccttagtggtctctgatggggggaagaatgatgatttcagttctcagaaatcccaatgggaaacaacagttacaaagtgccctgtgatccaccgctttttgacaaggtgaccttgggcaagtcacttcactcttagtttcctcaactattaatataatccaaggagagtaatagttcctgtctcctaagattaaatgagttaaacgcatgtcaatgcttttagtatagcacctgagccatacagtaagcactcactaagtgttgcctgttattattgtactgtatggtttccgtattctaggagactgcccttcctccatgtgaccatccgcagagggtatctgagggaaaatgcttttgctcttttggggataatttagaagtagaagaggcactggattaagtagagttatttcccaaggtggcttagacccacttgcttccattcactccctctcatttgtatatgtgacatttattgagaacctactctatgagagttcctagggattcaaagatgaataaaatgtggccctgaacaaagggatctcagtctagatcagggcttttcaaccccatcactatttttgtttggttggttggttggtgggttgtttttccgagacaaggtctcgctctgacgcccaggctggagtgcagtggtgtgatcatagctcatctcagccttgaactcccaggctcaagtgatcctcctgccttagcttcctgagtagctaggactataggcacgagccaccacactcagctatttttccccctttttttggtagggacagtgtctccctgttaccacggctggtcttgaacttctgtactcaagtgatcctcctgtctcagcctcccaaagtgctgggattacaggcatgagccaccgtaccaggcttccctctacactattgacatttgggactggataattatttgggctggggtctgtcccgtgcatcataggatgtttggcagcatccctgacctctatccactaaatgccagtggcactgtcacaaccccaccacctcatcgtgttagctaagagtagcccccagttgagatctactggtctgtttacaactaactataatataatatgataaaatatgtttgtgcaaagtgttgagtgggcagtgtgttggaggagcaactgactgcagggaggagggttcagaaaggcttctgaggaggcaaaatttgcactcagcattgaaggatgagaaagactgtgccaagcagtgaaggagggaatgagtattgtggactaaggtaacagtggcacagagacatggaaagtatgcagtgctggggaaactgtcgcctcaagtacatggaaggatgtggtggaaataggacaggaagtccactgggactagatttacaaagaaccttgcatgtgagcctaagcaatttagactccagcctgaaagcagaaatccagcgtgggaaggaagagaaaaaagcacattcgtttcttggaaagacttaccatcctcaactgggaaaagatagagacgatggacaaaaatgagtaattccttcttttaatctggattttctttccagttatggattggctcttcagcccacagcttctatactcctcgaaataagagggaagaaaaactagagaagccctcctattttagaacacaagattcactcaagaaaaagactcaattttactcctccaaatagtccttgaagctacttgaaaacctctcatagcagaaactgatatattcttttggttgatgtctttttattttaattttcaaaaagtttaggaaatagaagcacacagggaagtacagaaaataatataacaaacatcctgtacccattacccaaaaatttctttaagaaatagaaaagtacagaacacagctaaaacccaagttaaagagagtttaggttttagatagatacttgggcaggaggacacctggctaacatttgcagcatcagacatcagtgtgcaggttctggatgaagggctgtcccacctagtctgtccaaatgggcccatttcaaagacaatggttccctaacccaactatatccaatgccctatgctgacctactcaaggagattctaggtcagtgggtctaggttggggcatcggaaacagtatgttaaacaagttcttcacgtagttctgcagtggcaaaaaccaatgcttgaagcaataacataacctgtcaacctattcatctgttgataacagatcctgcctcacaagtttactgtgaagattaaatacatacacacaaattgcttagcactggcttataagaagccctcaataatacttattaacaataatcaatgttcactgagtacttctttagtgtacactacggtacaagggtctgcaagaaattcaaaggtatatatcaacctctccctgaaggcagagtctgagtttatcttactcactcaatgccctgcacaaagcagacactcaaacaatacttattgaataaatgagtgaaaaagtggccctgatcttcaaggaaattacaatctggttgtgttataaatagtatataagaaactgggcaggggccaggtgcagtggttcacgcctgtaatgtcagcactttgggaggctgaggtgggagaatcacttgaagccaggagttcaagaccagcctgggcaacatggcgagatgccatctctacataaaaattagccgggtgtggtggtgcactcccagcactttgagaggctgaagcagatggatcacctgagctcaggagttccaaaccagccaaggcaatatggtgaaaccgcatctctaccaaaaatataaaaaagtcagttttggtggcatgcacctgtgggtcccaggtacttgggagactgaggtgggaggatcgcttgagcctgggaagtggtggttgcagtgagtcgagatggcaccactgcactccagcaagaccgcaactccaaaaaaaaaaaagaaaaaaaagaaaagaaattgggcaggaccaaaatattaaactactggttatacgcagtgtaaagagggctaatcaaaagtctagggtctgagtcccactttgccaccaattagctgtgatatctacctggtcagtttactccctgagccttagttttatcctcttggagtattaggctatgtctgggtactaaggaccctcccaagaggatccatcaccaagatcaagacaggagctgtaggcaggggaggtggcagcatgggtggtcaggaatgcttcaagagggctaaagtggcacatctagagaaggaaagaaaaggggtagaggctctcccaatatacaggaatggcaggaggaacaagagaggtaaagtgttcagcccagtcttcaacctctgccactgcaccaaagctaaaaaaccaactatcatcaaaactaccttatcaaccaggccagagcccagtaaaggagaactttaaactcccagtaaagggagtttacctcccaaataggctcatctcttcataaaatatattttcctttgaaaattattaacttgtctcctgaaaaacataaccaccaggacttcacgctagaaaacccaacccaggagctcaaggaagatggtggcaactttgagttttcctcacaccacatctgtgacctcaaccctcttcttaaccctgtcccagaacctctctgtcatggatcagctactcccaaaggcaagtatgacttctctcagctctgccctttctcaacctgacagctgtagcacaacatattcaaaggagaggccaagaaacccccctggttaagaaccaacctccgcagcctttattgagaatgaagaacgatgagctgatttgaattattatatctttctacagctattcccttttaaatatttatcctggcaaataccagcaccgttttttacaacttatttgaattgtgtgactattaagcaaaccaacccataaaatcagctcttgctgctggggtttatgtgattcatagaccacagcttattaaaaaagggaacccactgagaacagactagcctcacaagtgcccctcactatctctaggacagtgtcaagccttttcccaattcttgcctgtggctcccaaactaccacagttagtagcatagaacatgaacagaatctacccatttccttatggctctttttctttgtaacaattctgatgagtcttaactggaagtcagggttagaacagacttaaaggagacagtcaaaactcttaagaggctcacaaacaggatagatgccgtagaggatttacagtcaacatctgtggaaagaacttaattgaggactttgaatagctaggaacaagcatgagatatcctgattattcaccaccagcttagttcttgtttggatcataaaactgctttgagactccataaaagctcttcaccaaaaatgcccatgcacacaaatgtttatataaaatttcaggaaattcaaggacacccctgagcccatccacagttcccctaggggtctataagcctcagttatttcttactatcactgttaccacccaagctgccttcatctctcccctagattattaacatagctacctgactcatctcccaacttctctacacaacaaccagagtgatagtgatcctgttaaagcttaagttagatcacatgacttctcggctcaatacaatccactagcttcccttctcacctggaataaaagccaatgtctttgcaatgtcttacaagaccctacaggatctgtctccttgctcttctcaaccttaactccagctgctctagccacatggatctccttgctattgtcctaaatgacagtcacatttttggcctccaagcctttatctaatgctccatctaccctcaatctgcatgaggctgactcatttcttcaaatcttttctcagttgttacttgtcagtgaggcctttctgacctctatttaaaactgccaccctgcccctaccccgcatgtcccaccctcctctgctttcttcttctccatggcacccactgacttcttacaccttatacattttacttccctgtttgttattgatctcccacactagtttgctccatgagggctggatttttgtctgctttgtttcgctactgtattacactcctggaattgtgcctgatgcagagtaggcactcaataaatacttgactgaccaatcaatgactgagtgattacactctgtagtggtatgaatgtatccaggctgggtggtgcaggagaatgtacatttattgaaatgcctctaagtgccaagcagtttgcaagctgacatcagtcatctcatttaattggcacctacaatcccaagagttatttttatcctcatttcaccaccaacccaaaaatgaaatacttaagcataaatctaatacaatatgtacaagaggtgtatgaggaaaactacaaaactctaataaaagaaatcaaagacaaactaatcaataaatattccatcttcatggatacaaatactcaatattgtcaagatgtcagttctttccaatgtaatctgtatattcaatacaatcccaatcaaaattccagtaacttagtttgtggatattggctttagaaactgattctaaagtttatgtgaaaaagcaaaagattcagaatagccaacacaatattggaggaagagaacaaagttggaggactgacattatctaagttgagacttgctataaagctacaggaatcaagacagtgtggtactggtcaaagaacacacaaatagaccaatggaccagaatacacagcccacagacagattcacataaatatagtcaatgatctttgacaaatgaccaaaagcaatacaaatgagaaaacagtcttttcagaaatggtgttagatcaacaagggatccatatggcaaaaattgaatctagatagatcttacacccttcacagaaataaactcaaaattgatccgggacctaaatgtaaaactatccccatttcacggtgaaaactgagacccggaaagttaagaaaatagatgaaagttacagacagctggtagtggaacataattcaaacctgtctgtgcaaatccaaagccctgctcttcctaccacactttgcctcattctccttggtagagtagttcccacttttcttttttttttttgagacagagtctcgctctgtctcccaggctggagtgcagtggcgcgatctcggctcattgcaacctctgcctcccaggtacaagcgattcttctgcctcagcctcctgagtagctaggattacaggtgcacgccaccacctggctgatttttgtatttttagtagagatgggctttcaccatgttggtcagactggtctcaaactcctgaccttgtgatccgcccatctcggcctcccaaagtgctgggattacaggcgtgagccaccacacccagccagttcccacttttctaaagaagtgcaactgccggctttcgtacctagttccatttcttgtgtacctagttctatttcacagcaggggacctgaatcagagagaatcagggggttcagggagctctcatcaagcaaaaatcatttacagcctaagtctttgcaagtttatatcaaatattgttatgatataataaacatccttctaagggatcttatcacttccagagttttattcattcattccattcactcatgagtttcattcattattcacagatatttgttgagtatctactatgtgcccagcactgttctaggcactgagcatatagcacagatgccaccctctacatgtaggtttgaaatctaaggcagtgtactctaacagaaatgtagtgtaagccaaacgtgcagttttatattttctagtcaccacattttcaaaaaagtaaaaataaacaggtgagatgaactttactatattttatttgacataacatatccaaaaaaatcatttcaataaataattaacataaagataggatagtcgtgagttgtttaacaacaggataccttctgagaaatgcatcgtaaagtgattttgtgatgggaatatcatagtgtacttacaaaacctaaatgatatggctgactatatacctaagctatatggtataggctattgctcctaggctataaacccatacagcatgtactatactgaatactgtaggaaactataacacaatggtaagtatttgtgtctctaaacataggcaaagcacagcacacacacacacacacacacacacacacacacacacacacacacacacaaaggtataaaagaaaatggtccaaggtgggtggatcacctgaggttgggagtttgagaccagcctgaccaacatggagaaaccccgtctctactaacaatataaaaaaattatccaggcgtggtggtgggcacctgtcatcccagctacttgtgaggctgaggcaggaggatcacttgaacctgggaggcagaggatgcagtggactgagattgtgccattgcactccagcctgggtgacaagagcgaaactccatctcaaaaaaataaattaataaaaccacacacataaacagcacagttgtataaaaatatttttctttttttaaataaatatttttatttcttataaatatgttgcctaggctggttttgaactccttctgcctcagcctcccaaagtgctaggattagagatgtgagccactgtgcccagccaatatttttgctttatatccttattctataagctttttcctattaaaaaaaattccttttacttttaaaacttttttgttaacaagacagaaacacacacattagcctagtaagcctacagagggtcaggatcatcaatatcaccatcctccacctctacatcttgtcctactggaaggccttcaggggcaatgtcacacgtggagctgtcatctcctctgataacaatgccttcttctggaatacctcctaaaggacctacctgatgctgttttacagttagctttttttttttcaataagtagtagtatactctaaaataacaataaggctgggcatagtgtttcatgcctgtcatctcagcactttgggaggccgaggcaggcggatcacttgaggtcaagagtttgagaccagcctggccaacatcgtgaaaccccgtctctactaaaaatacaaaaattagccaggcgtggtggcgggtgcctgtaattccagctactcaggaggctgagggaggagaattgcttgaacctaggaggcagaggttgcagtgagccaaaatcctgccactgcactccagcctgggcgacaagaacaaaactctgtcgcaaaaaaaaaaaaaaaaaattattagcccattgtggtggcaagggcctgtaatcccagctacttgggaggctgaggcaggagaatcacttgaacctgggaggcagaggttgcagtgagccaagatcgtggcactgcactccagcctgggcgacacagcgagactctgtctcaaaaataactaaattaattaatttaatttaatgacaataaaaggtatagtatactaaatatataaaccagcaacatcgtcctttattatcattataaagttttatatactgtacataatagtgtgtgctatgcttttatacaactggcaatggagtaggttcgtttccaccagcatctccacaaacacatgagtaatgtgctgtcactatatgatagggatttttcagctccattataatcttatgggaccaccctcatatatttggtccattgttggcctaaatgtcattatgtggtacatattattaatgagatattttactttttttagtatgaattttttggtgtgtattttcttcacttatagcacatctcaattccatgcaacattcaagtgctcaatagtcacgtgtggctagtgattacagcattggaaaaagacagatacggttgaggaaacttaaaaaaatgtagcaaatgtagttgtagagacgtgctcaagatcactcaattatcatagctaggacgtgagtctccagcgaccttccaattgcctggttgaaccaaagccctggttcattctgctgcgcattaaaagcaggctttactcccctccaaacagtagaatcgcagttaaacttagtcaaacaaacttaatgtatccaatacaaaactcatctttctaaccctaacacctcctcttcctctctattttctatttcagttgatggtaccattatgtttctgctcactcaaattattattattttatccataaacgagcactttatctagaagatcatttaaattctaaatgatcttcaaaaacgcactttactctccaccctaactagctgaatcatctcccacatgggtcactatgagagccttctgatttgttcccttgcctcagtctctccccacccagcttcagcagtattccctaagactcttcatggctctccgtcctctacagagtaaagacgacactcttcatcacacagcacagaattctctcgggaacctgttctttgcttacctaacaaggcccagttgtttgctcttcctagactctgaagaggtcacttaccctcaggctgctacatttgtaaaaatcgccatcccaactctcaaagagctggcttcagatttgagataatacactttgaatgatatacaatcaaggagtttctcctccatcactcctttacattttatatctatctgctgtttagtgcctcgtctcaattccatgaaagctactgaatacaaactatttactagggagtctgcgggacacaaacagagggattatatttaaaaaatagattgacgcgatctttgccttccccgacctcattacaatatagtttctccaccaatatctttaaaaacagatcctctctaacagtatgagaaaatcaaggggagcctcggaagttcaggccaggctgcgttccgaggagccgccacgtccccccacctccgcttcccgggccgcgattgcaggttgaaaactactcccaaacatcacagggcaggcagaatgcaactacgacccacgtggcagacgggggcggggaccggtcgcgtggccgcggccttggctcttgcgcctgcgcgctgcctcccgctctaggacccggatttaaagagacaggcgctccaaccgtcgtgggctgcccgcggcctgtaatgagcaagttccgaggcctacggtgagcgccggagccggagaggcaggtgaggggctacgcggcgcggcacggcgcggcggggcccggcgtggggaaggcagcgggcccggggcgaggagctcggcgcggccggggagccagccccccggctcctcccccgcccgcctgcggagccccggggcacaccctccgtgacgtggcggccctcccgggagcccagggggaggctcgcggctccccgggacccccacggggccgcgtgaggcggggaggccggcgcccgggctgtgttccctgtggaacccacggggccttctcgtaccctggcccggcgtgcgtcctcctgcgctgaaccgggagcgctcgggtgggactcagggagccttgatcacttcccgcctgcgtcccggacccggtggaggagcgctcctttctgcctcgccgggggtcgcggcctacgccgccgaccccactgtccccgccactctccgacagcggcgcgggaagcccttcgagaaaagcggcggcggccaggcctcagcgatttccttctcgggcccctgggctgcggcagttgtgagggtgcggaacgagggacagacgggtttcctcaaagctgcattgtgcctcctcgtggcccagcgcctcccgagcctccctcaagtccactcctttcattattggggccctagaggttgctctgtaaattgatcttctaggaaaagtgttgaaactcacttgttctgacctccttttatgggtctgccgtacttccacttacctcacctctgtggttcttaaactttgggagttatatagccctttgtgaatatcacgaaagtgatagacctcctccaaaaaaccgtgcatttttatcgaatgtacattttgtatacatttttagagagctcagaacagcctccctcccccacaaccagcgcattcatggattccttgtaattttcccaactaccctgtgaggtaggtattatttaccctgctttagaaataagaaaacagatgcagataaattaagagttttctccgaggtaacagtcagtaaactgtacagtcagacttgcactcccatcccttattccaggtccaccagctttccttcacatcatgttgcactacagtaagcaaagcctgctttttattataacgtgacagcaattttgcttcacagcgtgtgcagactgaacataattccagtatacttaaaactaggactataaaatgctttagaaaacatgaatataagaagatgctgatataatctttttccatttggattgatttatgagttcctgtgagtcttgctgcccagtgacttcagcattctctgattcaagttgctgaatgataaacaggttaattgcacatcggaagcctcttcttgaaagataacgacgtcaccgatcataataggagctgacgttaatgagagctcttgctgtgtgcccaactgttttaagggttttactcttagaacagctctttaagttaggccccataattagccacattttacagataaggaagctcaggaacagaggtaagaaacccatcaaggttatacagctggtaagtggctgagttaggatttgaactcaggcagtctgattccaggctctgcttagttgtctctcaatatagggattctaactcaattccaaatctatatagtggcttgatttctgaggatggcatatgtgttaaacttcacaataaaaacttcatgaacataatgtaatttttactggtgattaaaacgaaacttcagggccaggcacggtggctcatgtctgtaatcccagcactttgggaggccgaggcgggcgaatcacctgaggtcgggagttggagactagcctgaccaacaagaagaaaccccgtctccattaaaaatacaaaaaagttagccgggcgtggtggcgcatgcctgtaatcccagctactagggaggctgaggcaggagaatcgcttgaacccgagaggaggaggttgcggtgagccaagatcgcgccaatgtactccagcctgggcaattaaagtgaaactccgcctcaaaaaaaaaaaaaaagaaagttcaggatcttgtaatacttaaaggtcatcatccattatgagtatcatatgttgctgatggcctaaaaagagcttttatgttatttggattttcttcattgtgatgtactagatgtacatgtgtgcattagataattgaacatcctgctgcgagctggcttttcctgtatcagaactctttcatgctgtagagtagactatgaatgtaatactttggaaagtgtttgattagtcatcatggactatataagacgctggcctttggaaaattggaagcctatctccttgtttatatcttttttttttttttttggcctcctactctttcgtacagctatatgtctttggctttcaagatcttctttccacaaaccctccgtgcactcagccgaaaagaactgtgcctattccgaaaacatcactggcgtgatgtaagacaattcagccagtggtcagaaacagatctgcttcatggacatcccctcttcctgagaagaaagcctgttctatcattccagggaagccatctaagatcacgtgccacctaccttgttttcttgccagggttgcatgtgggactctgcagtggcccctgtgagatggctgagcaacggttctgtgtggactatgccaagcgtggcacagctggctgcaaaaaatgcaaggaaaagattgtgaagggcgtatgccgaattggcaaagtggtgcccaatcccttctcagagtctgggggtgatatgaaagagtggtaccacattaaatgcatgtttgagaaactagagcgggcccgggccaccacaaaaaaaatcgaggacctcacagagctggaaggctgggaagagctggaagataatgagaaggaacagataacccagcacattgcaggtaaggtagagaacactgctttctcatcttactggtgctgagagaaaaagggataaggagttcaactgctttctttctcttttttttaactttgctcttttagagatggggtctcactctgttgcctaggccagtgtttaatgttgcattcgtagctcactgcagctttgcactgctggactcaggtcatcctgactcagcctcccaagtagttgggattacaggcgcatgccaccatgcccagcctttaacgttttatttggaaataattttaaactcactgaagtgttggaagattaaaaatagtacaaagaacattcatattccttttacccatatttacctattaacattttactctatttgctttatcatatttgttcatgtgctgtctctctctacatacatacacacgtgtgcgtgcactcactttaaaccatttgagaataagttgcatacatcatggccctttaaaattcttcagtgtatataccttaagaataggatatatgacccttatgcgactataatatagctatcatcttcagaaaatttgtccttgatgtaatacttaaatctaccatctgtatactattttgtcaatggattgagtcataccttcagtagccttttcctgcagtataggatcccagtctaggatcatatcaggtgttgcatttagttgtcatgtttctttggcctcctttaatctgaaatatttccatagtctctcttttatgacattgatattttggaagaatagagtactgattactatcctcttttactttttttcttgtagcatataattcattactgtacttaactaatttgatacttaattgtcccatatttggccaattaggaacccctttacactgtcctctgtgtcctgtataccttcattaactttttttaatgtacttctttactcttgagcatagcaagatgcttttagtcttatcccgtatgtatccttccccagccctgaaattggtaatttctctggggattcctgttagtgggaaatgcccctgttaaagagtaaaacctggatactatgtgtccacattgtcatggggtatctgtttcttcttttttttttttttgagagtctcactctgacccaggctggagtgtagtggcactatcctgttagtgggaaatggtattaaagagtaaaacccggatactatgtgaacacattgtcatggggtatctgtttcttcttttttttttttttgagacagagtctcactctgtgacccaggctggagtgcagtggcactgtcttagctcactgcaacctctgccttccaggttcaagcaattgtcctgtctcagcctcccaagtagctgggactacaggcacttgacaccacacccagctaatttttgtgtttttagtagagacagggtttcaccatgttggtccagctggtgttgaacccctgacttcaagtgatccacccaccttggcctcccaaagtgctgggattacaggcctgagcgcccagccatggcatgtctgtttctaagccctttcagcagacagagctagaaaatatgtgcgtgtatatgcatgtaaaattcatacctatatatggctatatataacatgtttgcatgtacatgcatatttacatatgcatattttagaaattttatgccaatacccccaaatccagttagtcctctttgaccttcagtgtctgtaaaataatgttcatatcttcaacttagttctggtcaccataggaagacagttaacaatggctctaaaaatgggtatctgtccttgttctttgaaaggaaaaaagacttccgggaaagaaaactgtgcttcccatatactttattctcaggctccccatcccaccttgcactgccttagctattggcctcggcctttgttacttcttgacccatctctcatttggaggaagagaaatacaggtagagttcatgactcagataactaagcatctggaaattttccttcctatgctaggttgacatgctctgtgatcctcatttactttttgttcatctctaaattgaagctaattctgtggggttgggggttccctaagttttatccatcaaactatgatttctgatttcccccaaattgttatttctggagacttacatatgggataagaagtggagaatgttgatgaaaatttaaggtactaatagagataaatggtaactggatcttttgtctccagcatatccttcccttctgtccccacaataccctattacctactacccccactcaaaaaataccagccaccagccagccttgggctagtgctagggtagtgacttaacaagcaaggccctaggagcagttgatagattctttggatgtttttttcagagatcgttcactgaaggatattttatactcttttgggatcctacagatctgtcttctaaggcagcaggtacaccaaagaagaaagctgttgtccaggctaagttgacaaccactggccaggtgacttctccagtgaaaggcgcctcatttgtcaccagtaccaatccccggaaattttctggcttttcaggtaagataggttagggctactttagctgttatagtgctgcttttattttgtattctacctaggattctggctaaagagtgaaaattctgtgctatctcatctcattaataatttgcttctgtctgagcagagactggtaatggctaattctaagccttccgcttggtttttgtttgtttgtttgttttttggttttgggggtttttttgagatgaaatcttgctctgtcatccaagctggagtgcagtggtgcattctcagctcactgcaacctccgcctcctgggttcaagcgattctcccacctcagcctcccaagtagctgggattacaggcacctgccaccatgcctgactaatttttgtatttttagtagagatggggtttcgccacgttggccaggctggtctcaaactcctgacctcaggtgatccacctgccccagcttcccaaagtgctgggattgcaggcgtgagccactgcgctcggccagcattccacttgtatagcatttctttgtatactttaacctctatcgcagcggaaagatttgttttgtcaagactttttccccttgaaatagttacctgggccagacagagattattagaacctgtcttttacttccttgtgttttgataatgaaagaattttgagaaattgtttccctgaatatgcctagaaatgaaagtatgaaagaagggagatgtcatgcatggatctcccttcttgattcttaaaactgtttattcaaaacactggaacttcatggaacacaaaggaaggaaaaaaagatctgaaggatattgctatttgttgggaggcagtacagcctagggatgaagcttgcagactttggaatcagtgagctctgggttcaaatcccatctcctaaaggggaggactgtggctattatttgtaggacagatgaacaataaagtgttaagtttcctgttctcttcactaaaatacacacatgcacacacgtgtatacacacatatatagtttcttttatataaaatatagaattactatttcatagacagggattcaggaagactttgctggggcatgtggtatagataggagttgagaagatcaggatcatttattggccttacgtaaacagacagcattggactaggggcttttatatatgtagtttcatttcttcttcagttaaccctagacagtacttttatttaggaagtactttttattaggccctttttatgactgagaaagttgacgttcagggttatcatggagttagtatttgtactgaagtctgacttcagtacttgtgctcttttatactacactgtgttgctgcttttattgtttggagacattcttgtgattgactcagctgaagaaaataaataaagccaaaccacttggccttattttagaagtcatttggagattgaaagacattttatgtgattgaaagaagcctagacctgaggtcagaagacttgggttctggtccttgacagctcagatccctgagcacgtccttacctctctttagcctctgtctatgaagcagcagtggcctctcctaccatagtgctatgcacagggtgctataggagcacaggcagcaatatatagattactttcccctctgcttcagtgagtttgtgtatttatttgtttaagcttcatcatatctccatgcctcatctaccccatagtgttctcatgaggactgtaagagataacattgcaaaaacggtgcctggctctataggatttttattatttaaaaattctgggccgggcgcggtggctcacacttgtaatcccagcactttgggaggccgaggcgggcggatcacgaggtcaggagatcgagaccatcctggctaacacagtgaaaccctgtctctactaaaaataaaaaaattagccgggcgtggtggcaggcacctgtagtcccagctactcaggaggctgaggcaggagaatggcatgaaccctgggggcagagcctgcagtgagccaagatcgcgccactgcactccagcctgggcgacagcgagactctgtctcaaaaaaaaaaaaaaaaaaaaaaaaaattctgaggttggttggtttgttgtttgctggtaggccaaagatagagaagagtccaggtgatgataaggacagcatgtttctggaagggctccggtgttggggatggaatttgggaggagttgagagaaagagagtgttttagttcttgcaacctggttgaacattgacactttggagattttgtcccctaaaatcatatttagattccggatcagagatgaggatggatttataatttacaaagcccagacaagaaacagtgtacaacagcagttagcttagtaatggctctgccacaagtttgccgaataaaatttgctttttaaatggtcacaaggaggtgaaagggaatcaccgatgagttgcacataattatttttaagtgtctggaggaaatccctgccccttgaccaccttttgtaaaaatgtattattttttttttataactgctccttggggagcagggttttattttgacaataagaaaagaaaagttgaagcagcgaggggtagggatgttgagtgtactaatggaatctgactttcttagtagtgtctttgtcctggctctttcaacaaggaagtgggccaggaagtcatttgctcttctcagacctcagtccccttatcagtaagagaacattgaactagataatctttaaggcttcttccagctctgacaacctgtgatagcagtaatttcacattgtctaacacgtacttgatttcttacccctttctcatgccagcttttctgggatcagctttacaattgctctgagatccttctgaccactttttttttttgaggcaggatcttactatgttgcccaggctggtctcgaactcctgggctcaagcagtcctcccgcgttggcctcgcatagtgttagggttacaggcgtgagccactgtgcccagccagtcctgatcattcttggcatgactttggtctttattcttcagtaaagtgctcacataaagagatgcacatcagtctggtcttttgcttgggtctaaggaggccattgttcctttaacattatttattagctgtaagatttgggaaaattacttggcctccatttctttatctgtaagatggatataatgacatctaccccaaaagtctattcggggagattaaataaagctaaataccagcagaatatctgttagtttccttccttccctttctttcttctcagaaaggcagaatgaattcatctctgttgtttctccaacagccaagcccaacaactctggggaagccccctcgagccccacccctaagagaagtctgtcttcaagcaaatgtgaccccaggcataaggactgtctgctacgggagtttcgaaagttatgcgccatggtggccgataatcctagctacaacacgaagacccagatcatccaggacttccttcggaaaggctcagcaggaggtgtggcatgagcatcctgaataggcctttcctccggagagctcaaggccatggctgccttcctgggcatgtgagctgtatagttgcccgggatcccatgcttggtttaatgctgtactgtagtgctatctggaaattcttaataattttgaacaaggggcctcgcatttgcattttgcactgtactccacaaattatgtagccagtttttctcagagcactttggcatctgtcttcctctccccttattctgctcctaggaggccagaagaacccatcctatttgactagttagaaaatttactgtcctacatatttaattaggtttttgtgaaccatatacacagtttggaatagaatcttccaactctgtttctttcatttatctaacaaattgtcgatgagcatctctgatgtccttgtcactgggcacgtgaagtgaaactaaccactctgtccaacaagagttcatctgtaggctaaaggtgaggcagacacaatccaccagcctctgaactccatgctgtctcctactatagcgatatgcacagggtactataggagcatgggcagcgatatatagatatcttttggtctctgcttctttgagtttgtttgtttgtttatttattgagacaaaaaatgtggctgtgttgcccaggctggagcgcatgggtgcaatctcagctcactgcaacctccgcctcctgggctcaagcagtccttctgcctcagcctcccaagtagctgggactataggcatgtgccgctatgcctggctaatttttgtattttttgtagagacggggttttgctgttttgcccaggttggtctcaaactcctggattcaattaatctgcctacctcaacctgctaaagtgctgggatcacaggcgtgagccaccatgcgcggtctgagtttatttttttatttatttttgtgtgtgtgtgtgagacagtgtcttgctctgtcgcccaggctggagtacagtggtgtgatcacagctcactatagcctcgacctcctgagctaaagcaaccctcctgtcttctcctgcaagtagctggaaccataggcatatgccaccatgtccagctaattttttaattttttgtagagatggggtctttctttgttgccagggtggtctcaaacttgtgagcttaagcaattctcctgcttcggcctcccaaagtgctgagattacaggtgtgagccaccttgcccagccttctttgagtttatatatttatttgtttaagctctatttctcaagaagggttccttctgtctccagatggtttccacggtgatgtgtacctaacagtgaagctgctgctgccaggagtcattaagactgtttacaacttgaacgataagcagattgtgaagcttttcagtcgcatttttaactgcaacccagatgatatggcacgggacctagagcaggtcagaggaacgggagggagggtaggctacattccaggtggggttttgccaagccaggcacctgcagcctctttttttttttctggttgggacacatactgttttaggaaactgaaacccatttgagcaagcttccgttatagggggagctgaatgtgaggctatagctcttaatttcttaagtttctgagggtggaaaccatacaactgctgaaccacaaaggcctggttctcaaaaggcagaatttgagacttgccccctctgtctctcctggggcttttattctggactctttttttcttgcttgttttctcctataacttggctttaccaagctttggtttgtccgtgactctatccctggtaccatggcaagtttccatccccttctaggaattgtggatgggctagtgtctctaagaagtgggctagatatgttgagttgggataggagctatgattgaaatttcttgattcatcttcagtcctgggtcttgggggatacacttggccaccctagggttgcagcagtggcattttggtttttggagacagggtgacgtgtcagagacaatcagagtcttctttgagcagagcaagtctttccccccagctgccaagagcctccttaccatccaggaagtggatgagttccttctgcggctgtccaagctcaccaaggaggatgagcagcaacaggccctacaggacattgcctccaggtgggggagctgcctccgtcaaaccatgcccatagagagatgaactctcttgggaagggaaggttcccttggggttccagagctcttcaagaccaagttaaatgtgcttcatccccctaggtgtacagccaatgaccttaaatgcatcatcaggttgatcaaacatgatctgaagatgaactcaggtgcaaaacatgtgtaagtagcagctccgctgacagcctgagctgtcatttgttagctttgtttgttcccaactggtgtcaggacttttgagtcccagtcaggatttgaatcccccttccaccttcttactttctgtgagaccctgatctgtcacttgacctgtctctgcctccattttttcccatataaaatggagataacagtacctttctcacagagttcttacagttgaagtgtggcatacgttcagtgagtatagtatgagtctcttgcctactccagccccctcctcgctaaggcggcatccacataggcacagtatctcaaaagagctgaattttccaagagctttctctcctcttgtgaaagtctttagacaatagaacacaaccccttccctacagatgaggatttcttctgtgaggacagattgctgtccaaagccatggagtcaaacaaaggcagtggttttgtttccttgttcctgtaccccttggcaggttagacgcccttgaccccaatgcctatgaagccttcaaagcctcgcgcaacctgcaggatgtggtggagcgggtccttcacaacgcgcaggaggtggagaaggagccgggccagagacgagctctgagcgtccaggcctcgctgatgacacctgtgcagcccatgttggtgaggagtgctcccctgcctctgctttccagcctctccaagctccacatcctttgggctgagatcagatagggtatgagtgttgagagcacttgcaaattgactggagaagtttagggaaggaagagggaggtgcaagggggtatttctctgtaggaggcgaaggcaaaggagaagacagaggatctagtggaaagacctgagttgtaggcccagctacgccaccaagatgctgtagaatcttagatgagtgacttgcctctcttgtccttcagtctcctgtgtggatgacgtctgagactgcctgaggcatccccctagaatgatttatctgttatcttacctgaagacggatgtattaagtaacccctgagattctgtgacctactgcaaagtagatctgagagttggtagcagagccaggcttcctgtgacagggtgacttgggaagagggaggacacataaggaatgaaggctgactctgacagacatcatcttaggcctctgctcatttcgtaagaaatggggtttcctttccagtgttggttttcctgtgtgacagggcccaccacatatggtgccatgcctactgtgagattctttggatttttgagtgatgtacagtgctttttttgaaactgtcttgtttgtcatactaaaaccttggtttagggttttatgtttgagataggcaagtgttctctccctgctaggaatgtgggatagccagcatcaaaacagtgagatctccatcccagagatgggactgcggccacctgcagtagtggcctttctgacttttataaaaatgcctcctggagtctgttctatagtttgtcatttaaagactggcatgggttatatagcttagtggttaaccacacaggttttataggtgggcctagattcaaatctcattcttgccattttttagtgtaacttaagcaagcacctattctctctaaccttcagttttatcatccaaaaatgaaaacaatatttgtcacataggatgtcacatcggggatgaaatgagattatgtatgtgaagcgctcccaaaatggtagctattgttgtttgagttaggctagcacaggtaggcatgtaagtaggtgctccaatatctggaaaccctgtttgttgtagggacccacgatcactcaccctgccagcctcactgtcacctgcactctttaaccttagcttcacatacctcttttactgggagaactgatgtgttttataataagccagaggtcttgcaaggcctgaattattgagaaaagaattaaatcttgtttcactgggcttttacttgttgtacaatgaatagcattcatattcctcaaaaggcaagctcctatgtcagctcaggtgattatttcataggcagaatacaacattgcccagccctttccgttcccatcacctcttcaccagccttccctgagcgttaattgtgggcagtcagtcccaagacccaggtaactaccctcactaacccagttgcaaggtctctggctgtcgctgcttagcagcccctcattgaaagtctccaggctttgctttccccaccccaaggcggaggcctgcaagtccgttgagtatgcaatgaagaaatgtcccaatggcatgttctctgagatcaagtacgatggagagcgagtccaggtgcataagaatggagaccacttcagctacttcagccgcagtctcaagcccgtccttcctcacaaggtatgagtgccttcctttctgccaggaccgtctttcccctttctgcctctaacaacctcagggccagagtcccatagccattccagctgtggtacacaataagggtttgttttttatttgttgaatgaattaattcatttattcatttttggagtcttcccataatgaagggctgctcagcagggagagccaaagagccctgacttgggttcgtgaggatagagctccctggaacagtgatacttcttttgcccacagtgatattgggacagtgagctcagttggtgagttgctgtgtgtcttttgtgtttccatgtcccagatgcttcctgtgagctagactaaggcttatataccaggggctattgggctgtcattcattaatttgttcaacaattatttatcagatgcttacccattgttacagctggtggggatatagcagtggaaaaaatggacaaaagttctggccaccatgaagtttacattctgatgtaaacacagtcttatggggacatctaggagcctagattcctgttctaatcaggggtggcatttggaaccttattccttagcccttctccactcccaaggatactgtgagcctttgggagtgtcttcagggaaaagcagctggaacatctggctccggtagcttgtgagcagatggaattcctatctttgctatccttttctttcctaactcagactcagtttttcagagcctcagggggttcaggggaacatgttgtgtggcctgtgcttacctcagccttgccttcctgctggagcattgggaacaaagcagtcaggccatttgtttcatatgttcaagaggaaggctaagcagtggcctcattgtggagctttaatgcaggttcacgtgttctgtgaagcactgcaaatcactcaggagctgtttctggtgaggttggtgttaaatagacaccatctgtgacccaggaagaagtctgagcacacttttccagatttagtcctttccttaattttcccttacccagtattcactcatcctttgcctctcctgtgatttgggttcttaaagggctaggttagggattgaaggggaatggcatggatgtgctggcctttcctgttcctgctctaagcatcctgggtagtgatggctgtgggttcagggctcccactcagagaagacactgctcaagtttccttgctgcacctgagggagttcatttctacctttctggtttcaagtagtctgttctcccctaatccagtccccagcctgatagtcacacatcttctgcagtaggcactaatctctgcccacctaccctcctcctcctcccccgacaggtttaatctgtttcttccattttcctcaaaaattgtaccttctctacagcccatagaaagtgacccagcatgggttgacctcttcctgggcccggacagaagtactgaaacagatggcctctccctcttgtccaggtggctcgcaaggcctagctatatgttttgcacattagctgggccttccacatgttgttctatatcctgtctgggcccgggctttgccctccatggcatggtttgaggtccctgctgccatgtcatccctcaccaaagctccccttctgctttcaggtggcccactttaaggactacattccccaggcttttcctgggggccacagcatgatcttggattctgaagtgcttctgattgacaacaagacaggcaaaccactgccctttgggactctgggagtacacaaggtactagctcagggccatatgtgcaagaatgaatgagtgtgagtgagtatgtacatgtgggtgcacgctgcggtctgaaaagggaggaaatatcccttagtgtggcccttattcttcgcttctgacctgtttctggtttggatttttgtcttttgtttttctcctaaaaaggggctggtattgggaaccagtttataactgggttggtttccatttagcactatctgctcagtgcccttatggcccaggggcttcagagcagaaatagtactttttcatccggtgcctcagggggcctccagaagtggactggtactccttattttttcacactgacttttgtcctatgtgtacctactacctcattttcccttacagaaagcagccttccaggatgctaatgtctgcctgtttgtttttgattgtatctactttaatgatgtcagcttgatggacaggtgagttggctagcatctttaaacccagaaactgccaggaatctgttttcatttcctgggtgaggaagatgggggcttcaggttggaaaggagggtacagggaaccagctggcacatacgtttgtgctcaggagcttgccaaaggcaatggcaagagggagctgagaggaagcacaattgctacatgatcagttccccattcagtgtaagaaagagcccatgtgttgactccatctcttctctgagagcttaagtcacagaagaaacccaaacccccaaagaagtttctctactaaagcaaaatggactattgcagagaaatagactgtgagcatatggggtttcagtttatttctccaatggcacccctaggggctccagtggcacccctgggggcataaggcagatggttttcagctcagaggttttgatttcagaagagactgacaacaggaagctccggattataggggaggccatgggtgggaccatcttggagagaattagcagtcttgacttagctgcatccatatgcttgtgcctgagaaaccagtatcagccctttcctcacttagaaatgtatctctacccctgttcctcctgcaacagccacatccttgattggggaaggagaaggaagtagagagggaaggaattggtgggggtaggatttggggtttgggtcccaaggcctgtctcagcctgcctaccccggggttggccttgggatcggggcaaagcagggtgcaggggataaaaaatgagagttggagtcgtatttcaagtgggaccagaatttatacaatctgggctacaggccagttctcccttggctcgcttgatgaagtagaactaggaactacaactatgaactggctctatgccacagctcacaattttccatcttcggtcacgatggagcccttgtagcccttgacagcagaactgttacacatgaggtctttgatccatggcaaaccctttcttgaagtagcagttttatcattgtggcccttccttcctcagaattcctaataagggagggaggatcccggcctaacctcagctctcctgttctcctcagacctctgtgtgagcggcggaagtttcttcatgacaacatggttgaaattccaaaccggatcatgttctcagaaatgaagcgagtcacagtaagtgaagaccctatgctaggcagtgtcctagaagtttgaaagcagggcagagaactccttgggtcaactgcgactggaagaataaatcttaatgtcttatggagcctcctgataatgttggcctttgactattgcatatgttgcctgctagtcttcacccagaagggtagggcatggaaatccttcctaggtaagcctcctgtgtttcaaagccacagcagccctctgtttgggatgagaagcaacctgctttctaaccctttgtcccttatatttcaagtaagggtgtttccagtggacacttaactagtgtgtgaaaaggaacaacccccactcactcaccaccttctccactctcacaccaacttcagcatctctcttgtccctcagaaagctttggacttggctgacatgataacccgggtgatccaggagggattggaggggctggtgctgaaggatgtgaaggtaaagtggcctcgcttggcttctcctgtcgactcactcgcagccctctcccctgagcctttccagccctgaccaggagatggcggtggcagcctgcagtggttggggtggctgctggggaagtgtgggcagatgtgtcctggatctggaggactgctttgtgtgtctcctatagtgcctggagcctgagggctcttaccctgagggaggggcactgggctagatctggtgtgtagcagtgaaggggtgaacccatcctcatggagttgcctttctattctgtggtctctcttttgcttcccttcagggtacatatgagcctgggaagcggcactggctgaaagtgaagaaagactatttgaacgagggggccatggccgacacagctgacctggtggtccttggagccttctatgggcaagggagcaaaggtcagggtggcctctgccccctggggtggtactgttttagaaggtaccgcttgaggtacaggctggccttgttactggcttgatctgccagcatggccagttatgacttccgaagtcctaggatctagggccccaagctggcctgagtcacctcaggcagagctgcttactcggttagggagaagtcagaatagagtaccctatgctagcctagcagaaggacgcttaccaccaattatttcgtcagggcctgacagctttctcctcaggcaaaatctctttcctgactggaaaggaagctggagtctgaggaactaatacttttaagcaatctatcatgtgtccaacacagttcaatgccccagagcccaacaggttgggtgtgattatccctcatttacagaagaggaaattggggcttataaaggttaaaattacacagttagtaagaggtagctccaagaggtaaactctggcactctgacggccaggacccaaggtcctctccctggccctgggctcttgggactggcagagatggctcctccaacccacactcatctcacactcccctcccaggcggcatgatgtcaatcttcctcatgggctgctacgaccctggcagccagaagtggtgcacagtcaccaagtgtgcaggaggccatgatgatgccacgcttgcccgcctgcagaatgaactagacatggtgaagatcagcaaggtgaggaagggacctggttggccatggcctctggactggccgccatcactgagacagaggctgtgctttggggactacaggtatttctgtctccccagaaagaagggttgcagcttgctcaggggagcaggattaggccttataatctctgaatgccttcttgtggaaaatggcttgcatgcctctaggtcatacccactctgggctgggaggatcacatggctcaaacatcagctgtttaagtggcttcttataatctcattaccaagagaagggatttaagccttgttccaggttgggaacagcccaaagtagcatcttttctcctctaggaccccagcaaaatacccagctggttgaaggtcaacaagatctactatcctgacttcatcgtcccagacccaaaggtatcaacccagtggcttgggggcctccagctcatagaattagcttgcaggttctctagtgccatagagaatccatctcacctcgctgaaagtccacccagggataggggtctggatttccagctgagtgataggcacagggacaaccagacaactctgaggaattttgaatagaattctttctgcaatacaattgctttaaaaaaagagagagaagaagagagtacctatcccctcagcacaaagggtgtgttctagaagtaatctggcccaatcccttcttgtaccgaccaagaaagagatctagagaacaaacaggacttccctaaggttattcagcaacagcagcagcagaactaggacccaagtttcccagctgttagccaaagcttttttggtttttgttttgttttgtttttgagacggagtttcactcttgttgcccaggctggagtgcaatagcgggatctcagctcaccacaacctccgcctcccgggttcaagtgattctcctgcttcagcctcccaggtagctgggattacaggcatgtgccaccgtggccagctaattttgtatttttagtagagatgtggtttctccatgttggtcaggctggtcttgaactcttgacctcaggtgacctgcccgcctcagtctcccagggtgctgggattacaggcgtgagccactgcacccagccgcctttttggttttaattgttctgtattgcttctagctggttgggagatactttttttttttttttttttttttttgagacagggtctcactctgttgtccaggctggagtgcagtggcatgatctcatctcactgcagcctccgcctcctgggttcaagcagttctctcacctcagtctcccaagtagctgggattacaggggtgccaccacccccagctaatttttgcatttttagtagagatagggttttaccatgttggccaggctggtctcaaactcctgacctcaggtgatccacctgccttggcctcccaaagtgctgggattacagatgcaagccaccgcgcctggccaatacttgcttctccctttttttgagacagtctcgttctggagagcagtggcatgatctcagctcactgcaacctctgcctcctgggttcaagcgattctcatacctcagccttctgagtagctgggactacaggcgtgcaccaccgtgcctggctaatttttgttattttttgtagagacggggttgcgtcatgttggccaggctggtctcaaactcctgacctcaagtaatctgcccacctcagccttcctaagtgctgggattacaggcttgagccaccacgcccggccactgatactatcttcttaaccagtgatgacctgctggcttactcctgacagaaagctgccgtgtgggagatcacaggggctgaattctccaaatcggaggctcatacagctgacgggatctccatccgattccctcgctgcacccgaatccgagatgataaggactggaaatctgccactaaccttccccaactcaaggtagcagctcttaggctgtatatgtattctccaccccactgtccaggccttggagccttgggcatctagaccattcacatgtcctctgtcttctcctttcccccattctcctgaggcagagcaaggagggcaattagagagggagacaaactgctgctgggccaggggcacagcactagacctccttctccctccatctctgagtagagaaccttgcatttgcaaggccccactgagcagcctttagtctggggaataagagtttgctcctgttgccccagcaaagcctgctttgctgtacagagaacaatgatttgtaccctgattactcaggctatagggccatactttggaatggtgccaagggagccaactccttttccttgctctttatctttctcacatctttgttcccatatgcgcctaaaatacaccacacacaccacctctgaggccagactgggaaggcaatgaaaccctctgacattgtccctccccgcctcaggaactgtaccagttgtccaaggagaaggcagacttcactgtagtggctggagatgaggggagctccactacagggggtagcagtgaagagaataagggtccctcagggtctgctgtgtcccgcaaggcccccagcaagccctcagccagtaccaagaaagcagaagggaagctgagtaactccaacagcaaagatggtaaggatagggagggggctggtatggtgaagagggcggtgtgaggggcagagatccaagggcagggacccagtctcacattccagccctgagatctcatgattatctgtgtccactgcagtggacacagactacattcctggtgtgtgtccagccatgggccagagacccttctgctgggcaccctgtatctgctcagcaaacctgaatggagcagtaccctggggacagccagtctgaccagggaataagctacctttgagtaaagggcttagctgataactcttcactcccctctcacctatgctcatagcagagaaagcccctggtccttcccattactgcccctgacttcagggagcattatcagcaatccctaccctcttagttcttttgtatcatatgttttttagagacagggtctcactctgtcatccaggctggagtgcagtggcacgaccatagctcactgcagcctcgaactcctgagttgaattgatcctcccgagtagctgggactataggtgtgcaccaccacacccagcttcctctctgtcctgcaggcaacatgcagactgcaaagccttccgctatgaaggtgggggagaagctggccacaaagtcttctccagtgaaagtaggggagaagcggaaagctgctgatgagacgctgtgccaaacaaaggtgagggtaaaaacagcaacacaccacgtgggccagtttagcccaggttgtgttcccaaccttctgtacaagaagtttgaaagaggatgagcaaaggtgtttggggaacatcggctaaacctcttccctgcctgcagccactcctctgtcgtgggcagggtcagcaatgctgctgctcaccctatgtcctcttgttgccttgcagaggcggccagccagtgagcagagaggaagaactgtgccagcaggcaggagatagaacagcccggcctagccaggagagactgcagggactcactcagctgctggccccaagtcaaaatttacattaaagggaaaagaccagtctgggtgtgggaatgcagcattgagtttgtggtcagggtggaagcaggtccagcaagcagcgagtcggggagagggcactggcttggtgactctcctcccacctgaggagccttttccctgttacattttcttgtcagtcttgggtttggcaacatctcctgagcaattctttttttttttgagataagtctcgctctgttgcctaggctggagtgaagtggtgcaatcacagcgcactgcaacctccgctcactgcaacctccgcctcccaggttcaagcgattctccggcttcagcctcccgagtagctgggagtataggcatgtgccaccatgcccggctaatttttgtatttttagtagagacgggatttcaccatgttggtcaggctggtcccaaagtcctgacctcaagtgatccgcctgccttggtctcccaaagtgctgggattacaggcctgagccaccatacccggcctcttttgagcactttctgatgccaagaactaggtttagtactggctcaactctgggggagctgatgcctcaaaggacagatagagaagtaaacatatgattgacacccatgtcattgcgcccccacgctccccaccgccatccaggagtaagcatagaagtctcacagcacaaggcctgaactcggtccccaacagacctgtagaaacctttcccctctctcttcccagcctgaagtccttgaacccattgagagtagtaagcaggactcctgacccctcagtctagcaggttgtacagagtagactgcttggtctcaggggacatcactgagtctgggggcactgagtcagagccagctccgcctgcccaccatgactgggtggctcttatacacatgtactcttcccatctccaggtcccagatgtcgaggcctgtccactctccttttcccctaggcagggatggaggggcgtgtcagtcctgtataatttggagtgactggaggggtgggggtattgatgcatggtattccagtaaacttctctgcttgtgtcctaactctaggctccctcattctgtcccgtgctcatttgggtgaagacccatctgtacccagtgtaggtctgaccccaccctgacccctctgcatttgcaggtattgctggacatcttcactggggtgcggctttacttgccaccctccacaccagacttcagccgtctcagacgctactttgtggcattcgacggggacctggtacaggaatttgatatgacttcagccacgcacgtgctgggtagcagggacaagaaccctgcggcccagcaggtctccccagagtggatttgggcatgtatccggaaacggagactggtagctccctgctaggtttgctgtcttccctctccctcaggccatactctcctttaccatactactggactggactcaggctggaggcagatagacacagtatagggggaatgggcttgcttctcccaaacccaccagttctccactgtctcttctggaccaggaattagttgctgtgggtgccacagctgaagtcagtttgtcttgctggtttaaatagatctttcagagctgggtgctgggtttgccatctttttgttttctttgaaaagcagcttagttaccctttttataaataaaatatcttgcagttatctttgtcctttccccacctacacccccaataatttccctagagattaaggagtaaaggctgggctatggcagctctgtccacaaagccttctctcccatccttgcctgttcctttgtacttccaggctcattttaaagttgtatttaaaggactgccctcggaaatgcttctgtttagcggaacttgtattcagcctgacacgctttgccaggaacaaacctcatgtgaaagaaaacaaaatgaatttttttactttcttctctgtgttctcctattacatggtgaggatccccagtttgaagggaggggactagggtcaggtaggaaaatggggcctttatgaagaaaggggaggttatttgggccactcctctggagggatagagggctccaggaagatctgcatccccaaaacctggaaacaagactgttctttaagaataaaaatccacatggggcttgaggccaagaacagcccttgttgccaccaacatggagactttgtaccatatcccattcttagtgctcgagtgttccaacctgaagttgaagaagccaccctggctgcacatgccatcagccatgactgtgtatgctctggtggtggtgtcttacttcctcatgactggaggaataattatatgatattgttgaacccccaagtattggctgatgaacgtgggcatcagaggccagtagctttcttggcctacaaagtaaatggacagtatattatggaaggatttgcatccagcttcctgtttacaatgggaggtttaggtttcataatgctggaccagtcgaatgcaccaaatatcccaaaactcaatcgattttttttcttctattcattggattcgtctgtgtcctactgagttttttcatggctggagtattcatgtgaatgaaactgccgggctatctgatgggttagagcgcctttaagaagaaatcagtggatactggatttgctcctgtcaatgaagttctaaaggctgtaccaatcctccaatatgaaatgtgggaaagaatgaagagcagcagtaaaagaaatacctagcgaaaaaaacaggaagcatattgaagctcggactagaatttcttcttggtatcagagagacaagtttatcacagtatttttttttttcctgctgacctattgataataccaacaatgttgagtggcattttcttcttagtttttaatttcttaaagaaaatatactccatatctgcagggaaaaaaataaaaatccacacctgagaacagatccatacaacctgcttacaaagaacagctcctgtgctacctgaggctgatttatttgaagaacaaaaggaagagagacaatttagtgtagacaagtgctattcaatagaactttttgcagcagtggaaatatccataaatctgcagtatccaaccaaactagccacagacagctgctgagcaattgaaatgaagctggcacaactaaggaactgaagttcttattttaattcaacttcaaatggtcacatgtcactagtgactaccacactggacagtgcaggtgtagacggagttcagatcagactcctgaaacttaatggctctaaccttaggcaagttacgttaacatctaagcctcaatccctccaagtagaatgggtgcacctaaatcatagggttgtcctgttgtcctgagcaacattatgtaaagcacttagcccagagcctagcacatagttatctagagttgggaacgtcactcctggtgtgcatgtccagaccctacccgggagaagggcctaacctatgactttagaaccctcagttgcaggtgtgcatgttccagccaacactccactctgagtgcaggctcatcaggacaccatatggttgtaaactggctgccatgtcccaatccttccagctcttgagggtcagttctcaccttatgaacaaattaacaggctctggacctataagatcaaggaccactgcgccccctggccaccccaccgcccccccccaactttgatctgattgactttggcttccacctactgtttaaaatgtgtatgttgggggagtagggacagcacgggggaggggtttactttcctgactctagcccaggacatttggtgtttttgaataggcaccattcagccttgcttcagtattaggaataagatactttttattccatcctctatggagacaaaaagctgctcctcctttgagtactgacctacatagatttccatttctctcttcagcctcaggccaaacaaacaaccggacagggcagcagaacaaggctgtctcctcaggatcctgccaaaggcactgtcctctccaacctggacccagccccacttgcccttattggttgcttacacccagagtgcacactcacaggaaagggcctctgctggctgcaggtgatcatcttgtcccttctctgccttagtgtgtgttattgccatttcaatgtcagtggttttttatgtattttcttccagtctttgctgctgagatctgactgtatatactattttgtatcctttcatgtatttctttcatgtatttcaatgcagccctcaacatcatcatcataaatctctccagcagaatgctggaggcctccctcttctgaacctctacatgctgctggctggcatcaagcagaggtcatcactgggtgctgaacaggtcagctccctagggcaatgtgagcaaagtgttgtggctcatcctcgatcctttatgcccttttggcaagattcctttctcttctcagtcacagcagatggacacataatcttgttctcccaggggctgcattctcagtagtcttttccctgctccttgggcgcctggtcagggaggtttgtacaagcctgcgcacacacagcagtctgtcacgaggctgggccaaccttttttttttttttaaacagactcttgctctgtcattcaggctggagtgcagtggtgcaatctcagctcactgcaacctctgcttcccgggttcacaagcaattctcatgcctcagcctcccaagtggctaagacttaacaaacaggcacacaccatcactcgcagctaagtttttgtatttttagtagagaccacgtttcgccatgttgtccagactggtctcaaactcctggcctcgagtcatccacgcacctcagcctcccaaagtgctgggattacaggcgtgagccatggcgcccagcctgggccaaccttttctgagccatagtccagctgtactacagctgtatccaaaaggtaccatgtatctcccagggtaacctgaagacctaactgggcatactaactgtcctcagatttcagttctttaaggcccatctcttctagatcagtgtaaatatctgaactcacttggtgcttcaacccaattggtcttgggattcatcctttacctacccagctctcattctcttctaggttgttccatggcctcttccatatattacatttgtggtcttgagcaagttagttagttacaacaacactgagcatcttgaccaaggtcacttggcccaaccacaggctaatcccaggccatgtgcacatcccaggattagcttgtggtttatcagttgtcaatttttttttttttttaatacagggtctcactctgtcaccctggctggagtgcggtggcgatcagagctcactgcagcttcaatctcctggctcaagtgatcctcccacctcagccttccaagtagttgggactacccacatgcaccaccatgcacggctaattttttggtttttttgggttttttgtttgtgtttttttttgttttgttttttgagacagagtctcgctctttcgcccaggccggactgcagtggcgcaatcttggctcactgcaagctccgcctcccgggttcacaccattctcctgcctcagcctcccgagtagctgggactacaggcacccgccaccacgcctggctaattttttgtatttttagtagagacggggtttcaccgtgttagccagggtggtctcgatctcctgacctcgtgatctgcccgcctcagcctcccaaagtgctgggattacaggcgtgagccaccgcacccggcccttgtttgtttttttaagtagagacaaggtctcactacattgcccaggttggtctcaaactcctgagctcaagcagtcttcccaccttggcctcctaaagtgtggaaattatagcatgaaccactgtcaggctcttttgtcagtcctatcaacctctaacatcctcgcaccagacaggacaggtgtctgtattgaaactttattacaaaattataaagcagagctctgtaacaaaataatacacatttgggtttgctttaacctccaagtaagtctgagaaaatcttaataaaagccacttgaagtaacaattcacatccaagagatttccacaaatttatacaatgtatattgagcactagttcctgtacagcttattcttattagtttggatccaactattccaatgtattatgaaccagtcagctatctgtcttttgaaacaagtcttaactgaaatctcagagtaatcagcaaaagctacggaataattctaagaattagatgtttccatatcattaaaaccaaggatccatgaggggcagaagggaggattcaaagatttaaaaaaaatcaaattttagaccttggttaaatattaactggaatgggatcttggaactcccaactttaatttggtgtaataaaaatgatgcaaaaaaaaaaaaaatcagggttgtttgacaccttttttcctaaagggaaaccttcaccaaaaggggataaaagatttaaaggcaaaatgagtaaacaacctcagttttaattcttactgaggttactaaccagctatcagtatattattttcgatttgtgtctaggagggaaactgaagaggaggtaaggcttcagcagagaaagcaggttgtaagtagagagccagcttctgcccttaagttactgctagatcttagctgaattgcacatacatagacctgttttacagaggaactgagtagctgaatgaatgatcctttgctaattggtaggcattgtaaactatagtatttactgcccatgacaaaagtggaaagggatgtcttcatgagcaaatctgattcccccaactcctgcaaaggctgtggttcagaatcaaatcatccaggactttgtataacattgaggtaagtggcccagtgttcagttgactagtttatgcagttatttcattcctccaaaggggtttagtggttggtgatggaagaaagcataaatatgtctgtaccaatgtaataagtccctttagaggtttccctctgccatccagagtcatgattggttctagtctcagatttttcagctgcatgggaggggtaaggggtgggaggtgtctgccaaggcgtttagggtttgcatagttcatccattggtaatgggaaaacactctgctttcctgatcatgtgttttgtgcttggccacgcttctgcagcaaactcttaagtcctccagctcctctaggggtgtaaagactgtgagggctcaaatacatcacctactcattgcatggtccttcctaaagagcctagaaaatggtttctcctgctgggtgtggtggctcacgcctgtaatcccagcactttgggaagctgaggcgggcggatcataaggtcaagagttcaagaccagcctggtgaacatggtaaaaccccgtctctactaaaaatacaaaaattagcctggtgtggtggtgggcgcctataatcccagctactctggaggctaaggcaggagaatagcttgaacctgggaggtggaggttgcagtaagccaagactgtaccactgcactccagcctgggcaacagagtgagactcaaaaaaaaaaaaaaaatgctttctccctgacctgcccccaaaaatcagtgggctaggaaagggaatgaaagtagggtctcctcactccccaccaacctgggaaataaagacttgaactgtcggcttacaacagaatccagtctcattcagtacctcctgaaagctcttaagtgctctgtcttaacatttgctctccaggaacttcaacagcagtctggccagagaagagcacaggctctttgcctaaatctatttcttcaatgaaaccaaatttaaaactaccatggataagggagggatttcattttcagcgaaaagtggcttaagacttctagttgggaaaaggatcagaagccaagccaaaattaaggagaaggccactgcctccacccattgcttcccctttccgcataaactaaggatggtgcaaatcaggtcccaagagaagcagcagcagggattatgcacgcactatcccttgcagacagaaacaaatttcccagcagtttgggagcctgatgttttgttggctcccagagtcaggtcaggagaccaacagcttccaatcccagcatttaatgaagtggcttttaacaactttgaaatttttctatagcatttgtatttcatttctcaccaaagataagtttactggtctaaaatctgtcctaaggaccactatcggtctggtaaactaacatttttggtccaaagaaacaaatggatttaggcaatgtagcaagagactttagcaaagatagttaaagcacagaaagccggagagaccagaaatttaaatccgaatgtgctggggaggaggacttctgattgatgaaacacatgggcaagcatctcccatatggggtggggatgggttgggtacaggaggaggggtgaaactgtctaggttcagggaggaagacaggacccaagttctggaaagttctctgttcatcagttaccatcatcactccaagatcactgaaccaagaacatacccatgtgatttatacaagttcccactggccttgggctttgccagccaagaggtacacccctgggaagacaggcatgctcaggggtgacatggcatcttgcttgacctggttttgggaaccctgcaatatttctactagcttgctcctctgcaagctggccaaccctgagcccagacaccccaggctatttccctgtaaggcactgaagaaaccgatgcaagctctcaggaccggaagacatgcacagctcggattacatactgccggcagatgggacattcattcatgcgcttgccacacttggtacaggttaccatgtggccacactccagaagaacacagtcaatgggtgagtccatgcagatcttacacaggttctcctccaagcctgatggtactgctccccctgtacaaacacacagggcagaaaaaaaggggcagaggagtgaggagaatgtcttaagtgtataggggtgactgggggagggaggtgggagataacaggtacattgtaaacaaagtctcagtgcacatgcttccctcaaatagagctcctccgaggaaacatttcctcaataaccaactctggttacttgtttaatccacacttcatcccctccaacaggtaaagatttgaaaagtacacagcacttgtggatcagacacatcccagaacatgagaactaaggcaaagttctcaaagcttaaaagaaataattttcagactgttggggctgtaatatagtgagtgtgtgagtggcacgtagggactcattatcccctgaggcagaacaggctaaaaagataaaactggttcagaaaagtttagatagaaatggaactgtgatgaatggttcattaaggatcacaaggctttatctataaacatatcctccatttaataaagtcagggatcatgggggacccctctgctatctcacaaactactcccaggtttcctgaggaaacttcctggtggagaaacttggcagagattactgctccctctttctacccccacaaaacttttttatacccccatgactgcttatcacattggattaaaattttgagtttgcctacttactcccagagtagactatgagctctttaattcaacatattcaatcaatttttacaattatatgcttagcatttattccatgctccaaggttagatattcatctttgaagcccccaatgccagttatatggtaggtactctaaatgtctgatgaatgaacatcttcccaagggaatgacaacatcccacatttactgaatgcttaccgtgtgccaggcagggtcctgaaagctttgcatgtgttaactcactgaagcctcacaaaaactataaagtaggacctcttgttattttcattttatagatgaggccaactggggcaaaaaagttaagtggcttgcccaagggcacaaagctgctaagtcgaggagccaggattcaaacccaggcaggctggccccacagctcctgctctagaatggccttctgcctaactgccctaagagtagaaactatccagacagtatcaactgctgagtgcacagggttctcaataaatgctaactggcttgtgtcactagcagaatatagtgggcatgaccagtatcctagtagagctgacccaaacagaaaaaataatgttcaaaagcccagccatctccaatatgtcttaaattgtagcctgaagtaggtacccataaaaaggaactgatctcacagaagtcacctctaccatctgggggttggccaacccatagaggaattctcccttattgcatctatactttctcttttctggactattaaaaagtcaagaaatacttccccctaggaggtaggctgggtgtgaaagggagtgaaacccatttgcctcttttgaggtgctgttggtcctaacagaggtttggagactatacaaatacctaagatgaatgggaataatttataattttcagttactcattctctcagaagtaacaacaaacacattaactcagttgtcagcattctcccagggaatcagaaaaagaaaggaagcaccaagtagatcagcctgatcttggtaccggtgatgctggggggttggagggtggaggtgggtctagaactccaaatggttttggggaattgagaaaagctcaactgttttttatgtctgattagaagtaatcagacataaaattgcccattctgagcaaaaggccattttactaaataaatttgggaaatcttctgaaataagttttaaaatgctgcaggctagtccaacactactcttagaacgttctctcttggaagggagttcacaaccatatacccttgaggcttttgaaaacacatagcatattttagaatgtccccacagatggtcaggagttctgcagtgtgttctgggagtacctgagggcccagtggtggtctttaagtgagtggcagctgagctgagatatatagcttgtgcccagagagtagcacatgtgttagctccagagtagctctaaccattaccagccctgtacaaacagggctgtctcaggtcaccaccctttctttttggttagtaccagaagctgctaaacaccctgattccccagaaggtgtacacagagaccctccctacccagaccagaactgaaaacaccaagattttaaaaaatgagctgagtgtgatacatgccacccctcctctgtttcagtgttttacaaatgttggcttatgagctcaggtagcccagggacatgcacatcagtcagtccgcccctacgtatgctccactctgcttcctgcacagcgagcagagagaatttctaaagatggtgagaggccccctgggtctcagtgagtttcccacacaccctctctctgggggctcaaatgctcagaattcttagattactaaagggattggggttgaaggaggggaaggacaaaagggcctaagcccattcccaaacagaaacaactacataccgttttggtcttcggcaccactgactgaaaaggaaagagaaggatgtctgaataggtaaggcatgatggtacaaatacagtctcttactgccctgacatcatttctgaactcttaccactccctgctgggaaccaggcttgccaagagcctagatggacatctgccctctactcgctctacatgctcagaactcacacaaagctcctactcgtgcatctggtctacttttattttttatttttttgagatggagcctcactctcttgcccaggctggagtgcagtggcatgatcttggctcactgcaacctctttctcatgggttcaagcgattctcctgcctcggcctcctgagtacctggggactacaggcacatgccaccactcccggctaattttttgtttttggtggagatggtgtttcaccatgttgcctatgctggtcttgaactcctgatctcaagtgatccacctgcctcagcctcccagagtgctgggattacaggcataagccaacacacccagcctggtctactcttaggaaaaggtattccaccagtttgcacaaactgccaagtagaaggatactgtatatgtgcaatatccttttctattttgaagtcagcattaaagtcaagaaagaatgaactatctagctgtttcagtcagtcagagaatctggataaagttcccacgtggagtcatctgttctgttccccaggtcctgacgactggagagaagactcttgaaacaatcccaaagggaaaacagactccatgtcagtaggcctcagtctgtaatcgggtgaagagtcagtcagatgacccctaacactgatgaatttgagctactggtagaagagagcctgaaacctgacttcaaccactcttaccaagcaaggaatcagtatgttgctctgtaggaaccaaatcaactggggatgggaggaaaggagaagattctgtggtgaaataatttcaggaaatgctaagttcaaaacagccaaaacacatttctcttctgcaggacttctctgcctttaatataaaaatctaccataaatcagtaatgaagatatgaggtatttttccctaaactcatttaaccacagacccagatattttcctgggcatctcctgaatgatacagtgtaaaatgctctgggaaatgaacaaaaggaagagcccaagtgcagatggaacagctatcttctcctgccatgtatgtagattcactttctacctcccaaatcttcagaacaagcattcttattctaaggtaagaaaacttacaaggtggtggtgagtagggaggggatagcatatggtgagaaaggctatggacttagaccataaaattttcagttaaattttacctttcagataaaggggtgatgctaataatgtctatttcataggttgctctaaggaataaatacatacatgcaatgcctaatctagttttgacactcaaccacaaatgacagctattattagacggtgcaaatatgtaaggtgtctccttccatggcttaagtgtggaaattgagtcaggtcaataccatcatgctttggagtgacagcaaacactcctgagctctgtaaagctaccatgcagatagcccctcacccaggtgctggagtcctttctgatccttgtatagccgggtcactctctccatcagctcccacttctcacagcagcccttgtagttgacaaagttgcgagccaagatctctttcagctgccgcactgtcaggccttcaatgtcctccaggtcagtcaggtcagacagagaggcccttcggcctgggacaaagctgtcctctgagtcaatagactgcaatgacaaagatgagatcagtgtgctcagctcttacctccccaagctctttctccaaggaccccaaagcagtcaccacatcataattttggtgactgacctcatgaagggtaggaacagagacaggatgagtacctggcatggtgctctgcattgcaaaatatactagaatctcttcctgacccacgattctgtgctcaggagcaaacagacacagaccaaccaatcagtgtgatatagtactagatagaagtatagtagaaggagtgctggtttgagtcatatgaccctaattttgaatcttgactcctctgctgttaatgctaaataatatccagcaagttgcttaccactctgagcccgtttgcccctccattaaggggagagagcagtcctaccccacaggggtcctgtagaggttaaatatggccgcacatgaaacccagcatggtgctggcccttctcccctggagacttctgcttgcccacaagaggcacatttccctggcaagtactcctctatacacaaccttggccacagctccctggtctgtgctctggactggccctgcctggctaattgtctgacctccttcccttgacaatggctacagtgtgctagaagcaaggaaagaacaagactttaacagcaggaccacaagcctgccctccggcagctcttagaaagtcaagagactggaaatacaatgggccatgaggcttctccgtctccactgtgacctcacaactccttataaatacactgaccgcttcactagttaacctggaacactaacactaaaccctaccccaaaaatataatttcggaagcactatcatcacacatttattctctctccactcgactctgctaagaggttccgaagaacaccagtgaaagaggaaaggtgaagacacagacccaagcagaggccccacctgggtctcatcctcagcaggtactctggccacgctctccaggtagacgggttcctcttgatcctgagacacatggccattggcctgtgggaagagaaaagtaacatcacatctagagatgtcccagagatctgcatagcatgggcctcttttcaactcacacaatgtccagaatgtactcccatcatgcccagaaatccggagcctcttacagcatcattacaaaagcctgctctctcataccaactttgtcaagcagagaaacaacaaaaatacatttcaatagacaaagctgccctctagaacaaaactgcattaattctgcacacaccaggatggcagtagccacaactcatcatcaatttaatctcagcttgagcaccacaggtgaagggaaggtcattgtgtccattccactgctggactgctctctatctggcatcaaggtttttcttgacactgatccaaaattgccatccctatccctggttctgctcctcagaccatagtctcctggggtttttgtttgtttgttttttgtttttcccaaactgtttataccatgttttcccctccttcacactaaatctccctggcttccttatctgacactgatgggacaaagtttccagatcatcaccaccctagtctctttcttttctgcctagtaactactctcacattctggaaatgtgctccccatgttgagcacactattattaagtgctatgtccagacctagtcaaagagtattttaatgtatctaagaatctattagcctaacactatataaaacactgcctatgcttacggaatttcattatgcttagaattctcacttctcaaaaggttcctcctgagtactcttttaggaggtttggccaaagagtaggcagaactgttagcctcctaattccatcaccatttaagccacaaaccccttaagtagatcctcttcgcccactgctccctgcaggcaaagggcctgctgtgagctcagagcaaagaggtgtctgagctcacaggccttttccaccagattctggggatgccagtgaagggacaatctgggaaaccaaagacacccaccgaccccagccactcaccccacattaggattcataatatggagctaatcaagaagaggcaaccaactgcaatggaaatgaaaagcagaagtaacaaaatgccaaatcaaggcaagatcaaatgcatagtacacatgtatggggatggatccaaatcaatgtcttcatcaacaacgttttctcttagcttactgtagatcctcactggtctctcaggtagtgttaccttggaattaccctggaatccttcagagcctaacctgttcctaagtagctatctttcagatgtcctgtttcctagaaagagaaacgacctcatgctgcaaagcatgctcttgtctttccagtttgcccactggctaaataaaaatccaaaactagtacctgtccacagttgtgcttattgtatatacttccttgcctagcaactattgattgctagggcactaaaggtgaaagagagaactctggttgagcaagtattataaggaaatttacattctaggtgcagctcacttatgaacttgtcagacagtactgcgtaagttacttaattcttccatgcctgtttttcctgcttgcaaagtgcagctctcaccagaacaggggatgtaagcagacactaaggtctcttgaaaatctcagaggaaaagtacccacttagatcttgtatgtagggtgacctttaggtgcaatctggaaatttctggttaatgacaggaagcttatcatctttcattgaaaaatctacctgaaaagtttgcttggttttttgtttttgttttctgagacaggatctcactctgttgcccaggctggagtgtggtggcatgatcatggttcactgcagcctcgacctcccaggcttaaatgatcctcccacctcagcctcttgagtagctacaggcacccaccaccacgcccagctaatttttgtattttttgtagagacaggtttttgccatgttgccaggctagtctcaaatgcctgggctcaaatgatccgcctgcctcagcctcccaaagtgctgggattaccaggcatgaaccaccacgcccagccaaggttctttacagaaaaagaattcctcaagttcttctcctggctccttatacatagagtggaaaaaaaaaaaacacaagcaaagggaagaatatatagcaggagtttaaatctgtctagcagaccaagagtcagagcttaggaaagaattaaagtccagctgcggagaaaaacatgttcaggccaaaaagggagttaaatgattttactgcagttaaattatgctatcacattggcctttatgcctcagtggttgtcaagagctgaatcagggggcccagtcctggcaaaggaggtgatcataaacaagtggcagcagccatccacatcatgtgtgggaaccaacagcactagcactataccagctctaagtaactcagagctcttttagacatggtatcacgcattcaggtctctcaacatcctggcaagatcaaaagtggtctgtgattactaacctcatttcattgttgtaggctcaacatttgcccaaggggatcaagaagtcagtgacaaaagtggatgtggaaattggatcttgtagttcctaattcccccatattgcccaagccctatagatcaagggtccccaacccctgggccacagactggtactggtccatggcttgttgggaacccggatgcacagcaggaggtgagtggctggcaagtaagcattactgcctgagctttgcctcctgtcagatcagcggtggcattagattctcataggaatgtgaactctgttgtgaactgcgcatgcgagggatctaggatgcatgctccttatgaaaatctaactaatgcctgatgatctgggtagaatagtttcatcccaaaaccaacgcaccccagtctgtggaaaaattgtcttccacaaaacgagtccttggtgccaaaaaggttaggggccgctgctataaataacagagtcacttaaggcacttatgcaacatcatcacttcttatacaacaattatgtccactggcctcactctaatccagtagttagttggtctacctgtctaccttccctcttctgggggctttttgaggacagagacagtttattactcatttctatactccccagacctgggtcatgattcagttgatgtgctgctcttagcttaccacttccaagccccccaggataatgaagaagcagcatgcaagtacagcgtgccaactactcctgcttccagccagtgactggtaagagaagcagtgtctttgtctgtttccccaccctcccttgcctccatatagccctttgctttcctatattccttgtgatggttactaaggaactaagtttccaatccagccaatgaagactgcaacaaaggagttaagttgaaagacaaattggaacagaactaaatttgatggcttaatggttacttttctcaaaatatttctggaatgatgaactttaaaaaatgtctaactaggatatgtgtgtattaaaaacaaaaaacaaacaaaaaaattggtactgtgcatatcacctctgaagaaagccaaaacatgagtctgatacccagaaaacacttggtgcaccagtagtcagaaaggcttcacataatcaagacacttagccttataccccattctcacaacaaaggcaggagaggaaaatgaaaatgagccctcaaactggcacagactggcagagactacaaatgggcccttacctgctgattctcctgaacctgggctgggggaacagaggtggcttgtgcagatgaagaggggaggttgggtgaggtaggtggaaccatgctggagtgaggctgggtcaggaaggcctgctgctcaggaaagtctggggacaaggtggaggcacgagtcctgtcctcctgggagattacaggctgctggccaaggaccaagagcaccagctcttctttctcccggcacatttcggtagagatgtcatggaggctgagatagtccctcaagtccttcaccttcatcttcatgagctcctctcgctgaaaggctgtagctcgaaaccgttggcagagaaggcagaggcggggcccattccctacttggctcgaacaggtcatgcaaaaatttttcttacagtccaagcaggtctgctgcttagagcaaaagacacaggaaaccatgtcagattgagagaacaagacagagagtgcgatgggagcttcagagctgccaagcccagcaggatctcctccagtcactcttacttttactaagctctctcatatatctaagggtgcaagccactttcagattttagattaaaagccactcgggtggaagacctccactatgtattgtgtatatccatgtacaggacacttcacatttattatttaatttgaggcttactttatttactcctgaagcacctgaggtattaattaagactaccagcataagaatcaaaaagctctgcatttttattaagcctccctcccttatttcttgcagtatcaccttgggtgtgtaatttagcctctctggtgctcagtttccacatctgtaaaatgggggtgataacagtatctacctcatggggttgttgtgaagattaagagagaacccatttagcatatctaacacaaaatgagtcctcaacaagtgtaagctgttttattatagctaggaaatattacctaacggtgacagccaggattcaaatcctaaactgtaattatttctgcatgaaggttatggtggtggtggttgttacaattaatattaatttattgaggtgcttctatatgctagcttgtcatttaattctcaaagcgacattgcaaagtaggtattagtgttcttccctgattcacagacaaagcaaccgaggcttagggagatcaactgttgtattcaaggtcaggcaataaacaggagagcgggtattcacactcaaggtctgttggaggctaatgcccatgatcacattctttccaccaggccatactgcatagctcagttccattcaagtacagagcagttctgagtcaagggcctggcttccatctccaaattccccacccactgctccatcgacacaggctccccactccaggaaggcccactcagagtgctgggaacccagtggtgcttacaagcatatccaagacaaatatttagacagcaacgggaggctgtctggacatcagggtactctcgttcctgaaagcacagagtgtctcagttaggcaacaagagcgcctgatgggcaagctggtactgcctggcagcagctagtctggcagtcgctgacaacacaggaaggcttactcagcccacaggaagcaatcctcggcctctcaccccacaggctgagtgagcacagtgacatccggctgagctctgttctggccaagagcatgtcacatccccaacaagagaggtaattcctgagcacactgggattggcctggagggcaccctcattaatcctttaaagaagttaaaaacttttcatcctgtgttgacttaagtagtaacttaaatatttctggtccatcttttcgaaatatagaaagatattcaagctaaaaaagaaagctcaagagacaagattctcatagtcaagatcacagacactctgggctgaagtaaatgtctgcatagttaagatagttatataagttttgtctaagtatcattcacatagtaaagggaaaaggaaataatatttaccacccagttttggctattaagacttagaaggcattgcaaagggacatatatcaagctccctaattctccatacagttataaccaaacaatactgttcagagatggacttaaaaggatgcatggctgcactagcattgtaacggttctgggaccagtagccatgcaggcagaaaatggatgttttcaggtatttggggttcattcacatctaaagcttttctattgggaaatgaagtctgtttaggatgactgagactgaaacaaagaggcttcaatgccataaacctgtgggcctgacatggaatattacttaagtcgatgcagtctgacaagacctagcttgacacaattataaagcctgcgttgctcaatcagccagatccaaacaactctctattctttcttcaaatgtgtgtggcttgctggatgcaagatcagaatgcagacaacaacctagcttctatgcacccgctggctcacagggaactctgaaataagctggcatctgaaacacaccctacaggaacaggatagggcttgaggctaaaaccccagtttgcagtggcagaagaaaacaagaagaaaggaaaaaagggctgtcaacaaatgcaggcagaatgagcaaaggacacacttatgtataaattctgccgaatggttcaaaacaactcagtaaccaggtagcatgaaagatgaattagtggaggcaaccaacatgcctgcagaaatgcccagggtgtactgagatatccagcatcacagaactggccgtggcgcctcaggccgacaccacccttcaaggatgccgtgtgcagggttctgctggctcccgtttgccaactgcccttcccttgctcctactccctcccaccctattccctggaatatgggaagtattacatgagagaatgtatataaaaccttagcacaaagtggatgctccagaaaaggtaacacggttacctttttctttccccttaccagcacctaagacccagtcctctcttaacactctgagatctgaatatcacttccatggctccaagcataacctcatcctccaactggtccaactaaagaggctgggtgccagactccctccaaaaccgtcagggtcgctgctaaaccacagggaggtattaccaatagagatggggtatttggcttgtggcaaaagtacagcctgccatttctctttaggactgaaaactcagggaatgcaagggccacatcttacttatattctgtctataaagtcctgaatgttatctgtgctttgcacccaataagcattcagaaagtactgaccataatgaagaataaggaaaagaaaaagatagtaggatccatggaatcatttcaattcaagcacttctagaaaaagacattttgaaagcccctgggtgttaaatgccaaacccttaagataagaatgctgatccacttaagcatgaaattacaaatgaaaaattctcatagatgaaaacacccttaatattcacaaaattcactgtaaattgcacaaaattaactcatacttttgtagcaagaaaatattgtagcaagaaaatattgtaccaataaccatcttttaccatccaaactggaatttttcttcccctccagaagctcttgttacacacacttttcttttgtcacatcgtatggtgtgcactgtcctcacctccctgtccaactgcaagctccccgttaagcagcaatggccttcttcatctctgcctccctagcccaggcaattcctgatacacagtagatattcagtaattcattttccaataagtaagaaaaaaagcaccttattttaatcattgccatgcttttctaggcacccaggcctgtaactgtcatcttctactcgacatgctgaatgtcttctgggaggggctttggaatcaaggacctgggtttgaatcccggctctgtcatttaataactatgtgatcttgagcactactgaagtcaagggaaaagaatgagtattttaatatctctcatgctatttgtcaggaatttaacacattcaatgttcttcttaaattttaaaccctaagccctagtttctcatatgtaaaatgggatttgggagattctaaaacctatatcatagctattgtgaggattaaatgaaataaaaaaatttaaattccttaaacagtcctttgcacatagcagatggtttaaaagtatgatttcctctcaaatttcccatgatcaccattttaacatcatatcctatcacttattctgagctgcaaacctctcattctgcagaaaaatgcagaatgcaggagttctttatccaggtgagggtttaccttctgcctagtcatgcttgatcacagataactcactgcctctggaagagggagggtgcacacctagacaccattatctagccagtaattttttttccagctcattcatttgggaagcatggctcccaagcatttcaaatgaaatctgctacagtaaataagctccagtctttgttatggtcttcatgtacctgaggcatccttaacgttgcttttgataaaaagaacaagttaatctgcaatcaggcctttgtgatggtggctaatgatggaaataacatcaagtgcctacgacattctaagcattgtgctaggcacctttcatggctttcttgtctcactttattcccacaaccctgaaagatgaggactacaatcatccccattttataacagggaaactgaatctcaagagaggttagatcatatagctagtaggtagcaacgctgataactgaatttaggtctactgactccaaatctatgctgacatgctttgcttttgcttttactcagttagttcttcttgaacatttttgtgaaagggacagctctgggtcaccagcatcacacagggaaaggaaaggttgcaggcattcagaggggtcagtggcgcttgcccatggtccataggctgcagtggcagagcaggccaagaagtcagcactcaccttcctggccgtgtttgcaaagtgagccccacaggacttgcagcttggttccaagcctgttggggaagggaaggagctgtacccagggttggaataggcctgcatcctggctccctggggtggtgggacctcctcaggctgtccatccaggcagaaccagttgcagcaggttgcccacatgataaaatctggtgcaagggaggaaaggggaaaaggtcagagttaagacacacctctactgtccttttgatgtccgagagcacaggtgagcagtgacactcaatgcacgcatgccaccaaggtggaggggaggatgtgttttcaaacagattttgtttttcttctttttgagatggagttttgctcttgttgcccaggctggaatgcagtggcgtgatctcagctcatcacaacctccgcctcctgggttcaagcgattctccagcctcagcctcccaagtagctgggattacaggtgcccgccatcacgcccggcttttttgtatttttagtagagatgggatttcaccacattggccaggctagtctcgaactcctgaccttgtgatcggcccacttcggcctcccaaagtgctgggattaaggcgtgagccatggcgctgagctggggaagactattgttcattgctttatataaatgatgcaacccagactcaaagaaatcaaatatatagccaatatatagagagctaatatacagagttgagattctacaaacccaggtcttctgactccaaacctaacatccttttccctatactatgttgtccattcattgatttcccctcctgccagccagtaaaactactcttacatttgtacccccaatcctagataaacttctatcacagcacctattatactttcttgcacagttatatcttgctctttattttctactactaagccataaattcctccagggcaggggatatttattcattatgtacagtactgttccctagcactgttgtccatgtagaagctcaacaaatatttgcttccttactgaatcagagcctctgtaggtttattaagaagtgttcggagccaggcgcagtggctcacgcctgtaatcccagcactttgggagactgaggcgagtggatcaccggaggtcgggagttcgagaccagcctgaccaacatggagaaactccatctctactaaaaatacaaaattagcagggtgtggtggcgcatgcctgaaatcccagctactcggaaggctgaggcagaagaatggcttgaacccgggaagtagaggttgtggtgaccccagatcgtgccactgcactctagcctggacaacaagagtgaaactccgtctcaaaaaaaaaaaaaaaaaaaagtgttgggccaggtgcagtggttcactcctgtaatcccagcactttgggaggccaaggcgggtggatcacctgaggtcaggagttcgacagcagcctagccaacatggtgaaaccctgtctctactaaaaatataaaaattagctgggcggggtggcaggcgcctgtaaccccagctacttgggaggctgaggctggagaattgcttgaactcatgaggcagagattgcagtgacgggagatcgtgccattgcactccagcctgggtgacaagagcaaaactccatctcaaaaaaaaaaagaagcgttggccaggtgtggtggctcacgcctataatcccagcactttgggaagccaaggtgggaagattgcttgagctcaggagttcaagaccagtctggccaacatggcaaaatcccatctctacaaaaaaatacaaaaatcagccaggtgtggtggcacacacctgtaatccagcaactcaggaggctgaggtgagaggatcacttaagcctgagaggcggagatggcagtgagccgagatcgtgccactgcacaactacactccagcctgggtgacaaagtgagaccttgtctcaaaaaaaaaaaaagtgttggtttattactcccatagtacatatcaaatgcaggtactggggacaaagggctgatgatttttacgatcacaaaacaaagaggatctggatccaatccctcaaatgtcagaataacctaacaattgtaagagggcccactcaaatgccaagcattgatgtgagatatgagtatgtttttctcagtagactaaagcagcccatgtagatactttgagcctgaactctttgcttacagagacaataaatgaaacatttagtgttattatttgataatcagttcacacaatagaatgctctgctgtctcctgactcattgttttaacaagggcactttcataagctagaaggaactaagaagccaactgattcaacctgggttatttcatcgaggaaaaaagaatgagaaccagcaaggggaagtaacttcctaggtcaaatagctcataacctcaggcctcttcacttctctaggtcctttttagctttccaacactgcctccactgcacctgtgatataattcgctcccttgcaggggtctctgattaacacctgtctccccaactggcctgtaacttgcctgtaacccccacgacaacagggattgtgatagtctaacagtgcccaattagacaggtagctcaacaagaactagcaaatgaattaatcatatacaatatctaagtcttaactaatcacacatttgttcaatcttcagcacatcagaaacatttctctctgactcaatataacctgtctgagggttctaagttcccaggagaggaacttagttcccaggaacttaagttcctagaataagaattgcaagtaatctgcctttacttgcaattaacagttcacatggaataatgaagtaaagagttcttcacagagtgtgtgtatgataaagtaaatgagttctttgctgccaagagaaatggggacaacagaggaggaatagccctctgaaatattttgtagttttttttttttttttttttgagacaggggtctcactctgtcacccaggctggagtggagtagcatgatctcggctcactgaaaccgccgcctcccaggtttaagtgattctcctgcctcagcttcctgagtagctgggattacaggcagctgtcatcatgcccagctaatttttgctttctttttttttttttttttgagacggagtcttgccctgtcgcccaggctggagtgcagtggcatgatctcagctcactgcaagctccgcctcccgggttcacaccattctcctgcctcagcctcccaagtagctgggactacaggcgcccaccacacctggctaattttttatttttttttattattatactttaagttttagggtacatgtgcacagcgtgcaggttagttacatatgtatatatgtgccatgctggtgtgctgcacccattaactcgttatttagcattaggtatatctcctaatgctatccctcccccctcccccaacgccacgacagtccccagagtatgatgttccccttcctgtgtccatgtgttctcattgttcaattcccacctatgagcgagaacatgcggtgtttggttttttgtccttgcaatagtttactgagaatgatgatttccaatttcatccatgtccctacaaaggacatgaactcatcattttttatggctgcatagtattccatggtgtatatgtgccacattttcttaatccagtctatcattgttggacatctgggttggttccaagtctttgctattgtgaatagtgccgcaataaacatacgtgtgcatgtgtctttatagcagcatgatttatagtcctttgggtatatacccagtaatgggatggctgggtcaaatggtatttctagttctagatccctgaggaattgccacactgacttccacaatggttgaactagtttacagtcccaccaacagtgtaaaagtgttcctatttctccacatcctctccagcacctgttgtttcctgactttttaatgattgccattctaactggtgtgagatggtatctcattgtggttttgatttgcatttctctgatggccagtgatggtgagcatttttttgtgtgtgttttttgtatttttagtagagatggggtttcaccatgttagccaggatgggcaaatctcctgacctcatgatctgcccacctcagcctcccaaagtgctgggattacaggcgtgaaccaccatgcccagccaatttttgtatttttagtagagactgggttttgtcatattgcccaggctggtctcaaactcctgacctcaagtgatccacctgccttggcctcccaaagtgctggcattacagttgtgagccaccatgcccagccaaattttgtaattctttaaatcacacgttgacagacaaatctgagacagtatgtaataataaaaagaatatagaatctggaataagaaggcctcagtcctaagtcctgctctacttacttaagggctgtgttacctccctctaacaagtaatagactttctgtacttcatttttctcctctggacagtctgtatgctataaagcactatataaacattagttgttgttatccacattataacaatgcttttaactacaatttttctgggaaggcaaaggtacaaaataaacctaataaacctacagatttcacaacaattaccatctggctttctgggcttgtcccctgcaaagaggacaaggttgtaggcaattcactaacttttttttgggatggagtctccttctgtcgcccaggctggagtgcagtggcatgatctcagctcactgcaacctctgcctcccaggttcaagtgattttcctgcctcagcctcccgagtagctgggattacaggcgcctgctaccatgcctggctaatttttgtatttttagtagagatggggtttcaccatgttggccaggctggtctcaaactcctgacctcaggtgatccgcctgccacggcctcccaaagtgctgggattacaggcgtgagccaccacacctggccaattcactaacttctgttaaactctctactcattcatgatgcatgcaacttttactgaaaccagtgccttgctgtttccagtgctaggtaaggaaggttaagtacctaccctcaaggagctcatggtctagtcagggtactagaaatgtaaaccaaatattgaaatttcagggtgatcagtgctttaacggaggtttgcaccatgtattattgggaggctacacagagggaaatgatcagctctacaggggaagaggggtgaccagagaagacttttcaaatgaggtgccgcacatcctatcatgatgtgggagtaactgggactttaccagaaagtcaagaagagaaggaattttcaacagaaaacaagtaatatgcaccatggcattaaagaaactacaaaatgcagctgggcgcggtggctcacgcctgtaatcccagcactttggcaggccgaggcaggaggatcacgaggtcaggagaccaagaccatcctggctaacagggtgaaaccccgtctctactaaaaatacaaaaaattagccaggcgtgatggtggacgcctgtagtcccagctgatcgggaggctgaggaaggagaatggcgtgaacccaggaggcggagcttgcagagagccgagatcgcgccactgcactccagcctgggcgacagagcgagactccgtctcaaaaaaaaaaaaaaaaagaaaaagaaactacaaaatgcttggttgggtcagggagcaaggcagggagtagatgagggtacaagtagtaaacaaagagccaagaaaaaccttttattccctggtaaggaacctggactggatcctatacgtaatgggacacgattagggcattttgttgtctcatttgcatattagagtgcacacttataagcagtgtgtgggacagatcagcaaggggccagctggaagcaggaagttgctgcagtagagaggcaagatgggtaaatatggaaattttaaaaaggtgcagatctgatagaatgagcagaatgaactagcagacgagagaagggggagagaaaagagagtctaggacaaagtctagggtctctgaattacacaacagaatagatggtggaattacttactgaaatgaagccctcaggaggaggcatgtatctgtgtgtggagaatagggacgggttaagatgatgagttgagttttgtactcatgggacatgctgatgtatacacaggtacatgtttgggctgaagataaaggtttgggaacacatggcccactggaagtacgtaaagccagagtggggccggaggctgattagatggtctgggtcagaagagaagaaggcatgggaaaaccacatctatagggcaagcaggggaaagcccacagcagaaaagaggaaaaaagaatgctcagagcagggggaactggaagagtgtttttagtttcaagaagaaattatcaacgctgtcaaatgtctcagagaacacaatacaatgaagaatgcaaaatgcccaatggactaaggtttaggaaagtgtccatgtgtgctctttgcctaagcagtttaggaagaaagaagctgataatcatagcttggaaagtgaatgagaagtatgaattcacacaattccaaggataaattattatttcaagaaacttgactgtaaaatgaaaggaagagaggaggcagttgctaaagaagatccagtgtcaccaggataaatgcagacatattcacaaactgctgaggagtccccaaaagattaagagactgtagaggaagtgaagctgacaataaatgattggaataggagtaaaggctggagtagaaaaagaagtgatatggctgggcatggtggctcatggctgtaatcccagcactttgggaggccgaggtgggcagatcacctgaggtcaggagttcgagaccagcctggccagcatggtgaaaccccatctctactaaaaatacaaaattacccgggtatggtagcacgcgcctgtaatccaagctactggggaagctgagacaagagaatcacttgaacctgggaggtggaagttgcagtgagccaagatcacaccattgcactccagcctgggcattttgagcgaaactctgtctcaaaaataaataaataaataaatacataagaaaaagaagtgatcatgtgatcagattagggggtaggtctattcccgggcaggataaaagtcacctcattcaccagacagtggggcagaggtgaaggcaggtataaccaaatataaatttatagtattagcaatagaaaagtgaaagtacaaaataaacaggaaaggggctgggcacagtggcttacatctataatcccagcatgttgggaggccaaggcaggagaatcgcttgaggccaggaattcatgatcaacctgagcaacacactgagactccatctctataaaaaataataataataggccaggcacagtggctcaagcctgtaatcccagcactctgggaggccgaggtgggcggatcacgaggtcaggagatcgagaccatcctggctaacacagtgaaaccccgtctctactgaaaatacaaaaaaattagccagacgtggtggcgggcgcctgtagtcccagctacccgggaggctgaggcaggagaatggcgtgaacccgggaggcggagcttgcagtgagccgagatcgcaccactgtactccagtctgggtgacagagcgagactctgtctcaaaaaaataaaaaataaaataataataataataatgataataattagctgggcatggtggcacgcacctgtagtcccagctatgtgagaggctgaggacagaggatcacttgagtccaggaggatgtagtgagctatgatcatgccacagcacactctagtctaggcaccacagagcaagttcctgtctcaaaaattaaaaaaataaaaaaggaaaggggagatagatttagccacatgaaaaaaataaacttttgttccacacaaggaatctacaggttgtaaatttttcctaaaaggactttgcacaaaataggcagacccacctggtaaggcacaatcagtaggaaaaactggaaagttgtatattgtttaaatccacgttacttttttttttttttccttgagacagagtctcactctgtcacccaggctggagtacaatggcgcgatcttggctcactgcaaccgccacctcccatgttaaagcgattctcctgcctcagcctcccgagtagctgggacaacagggagttaccacacccagcttatttttgtatttttagtagagacggggtttctccatgttggccagcctcatctcaaactcctgacctcaggtgatccacctgccttggcctcccaaagtgctaagattacaagtgggagctgccacgcccagcaaaaatcaatgtacttacgaagcaccagctatattgtgggtactggaaacaccaaaagtgatttcgactaggtctttgtcccgaggggatttggagccttgaaaggcatatagctcaacttgaacatcttgatacaagacagaagaaaactcttctttagctggagtcaagagaacccatcttcctccacactatttttattctcttaactttggttctaaccttaagtgcctcttctgaacatctctgaaagaagagctatcagcctattcaagtcatctggctacttttaaaaagaaggctggctgggcgcggtggctcaggcctgtaatcccagcactttgtgaggctgaggtgggtggatcacaaggtcaggagagtgagaccaatcctggctaacatggtgaaaccccgtctctactaaaaatacaaaaattagccgggcatggtggcacatgcctgtagtcccagctactcaggaggctgaggcaggagaatcacttgaacccaagaggtggaggttgcagtgagctgaaattgcaccactgcactccagcctgggcaacagagcgagactccatctcaaaaaaaaaaaaaaaattgccattctgccaccccacagtctccaagtttaggtggagaatgaagtcttatgctaggaatatacatatgtggggaagggggttattacaggaaagatcaggtagtggcaagattctccagtgttaacataccttagacctgctcagtctaacagaacaggtttgccaaagtcagccgactaggcttttactctttatatacctatatctgtatctatatctatagatatttatatctatatatatattttactccatatatatatgtatatatatataaattttttcttttttgagatggagattcactcttgtcacccaggctagagtgcaacggcaagatctcagctcactgcaacctccatctccagggttcaagcgattctcctgcctcagcctcctgcgtagctgggactacaggtgtgcatcactacacctggctaattttgtatttttagtagagacggggtttcaccatgttggccagactggtcttgaactcctgacctcaggtgatacacctgcctcagcctcccaaagtgctggaattacaggcatgagcaccatgcccggccactctgacagatatttaaataccaaaaaagaaacatgtcctaatgtggtcagttagaagtactctcctgccaaactggaaagccctaaccctaaataacaactacgttcagggttatttcagagggcggaaggaaagagtttgtaactaacaacgctatataagctaaaatacttttctcttgggaatatttttttcattcctcatccctaaatagatatacatacatggcatttgataatgctattaaaggactgaaagtggaactaattgtgaggtgtagaaagaattctccctaaggtgataaatgaaaaacttttctctcttatctacaaacctccttctgatcttgaaagaaaattattggatcttcactcagggcttgaacattccttcccaaactcccctcaccctcttcttaaaagacagacttggcaatttagtcctcaaaaacagtgtctaactgctgtcctacagagcttgcttgaagcctgctagggtctcctcttccactttccctaaaagggagaaaaatgggagatgtagggccagtagtgaataaaaacatttactattccctgtggaagaaccttgtgatatgaggcaagaatggctagctagcatgtaggattttgtcagcttgataagtatgctagtatttcttgggagagttagccctgctgaacaggaaaataacagtgttaataacagaataagataaattacctattccaggtgggcttggtacagtcatagttagaggcaagagggtagataatgtgatttctacctattaagtcctagattcctaagtagtttcaaaacacttctccgcttgttcacctgcccaaggcaaatgatttaaagcagatcagtggttgtcatgggtcttcccatgaaggggagagaggagtagaagggccatgctggtttgcaatgtaactccaaagacaccaaaaaactaaggcagtaaaaaaattcccaaggttctcatccaatctattctgattttaattaactgctctgtgcaccaaggtagttctgcaacaacaggctttacacaaaagcatagacagctacatcttggaattaacacacttatggtgcaccattgtataaaagtttacaaaaatccttttaaaatacctaaataaaatgcccccaaaccttaaagaaatgcctttctgacatgacaaatcagaaaagggctggaaagcaagccttacagaatcatgtccagtttattgagggtggtacgcctactgtcactaacgtatttctggaatggttaaaagcatctatgttgttagtgcataaagaaaagtatcccacattatgaatcattagtacagaatgggcttagcttcatcttgtgtattatcattaaaaagcaattaaagacaattgcaatggttttgaaaggaaattctgtgaaaagtctatcaacagggcttaggctaagcctctctaaaataattcataagtaattacatattttgagaagtaaagaagaaagtagccactctctgctggaagaatgcttatttgccaggcactgagataggtacttttacctagtgttatctcatgtgatcctcacaattctggcaaggtagattagttcttcccattttcaggtgagaaaaaaaggttcagagaagttaagtaacttgttaaaggtcacagctagaggatagcaaagccaagctttgaaccttggtcacttagaccctgaagcgtaccctcttgagatgtagtcctgatttaatttaaaaaatcaatctgtctaccctgtggcccatcccctctgagcttttgctttccatctctacaggaactttcctatcatcatacaggtatgctccagaatctcccaggtgttaaaaactcttctttgtcataatggaagtacaaattatgaccacaaagtgttaccaccactggaatagctaaaatgaaaaagagatactagcaaatgttgataaggataaagagcaactggagcagacgggcatggtggctcacacctgtaatcccagcactttgggaggctaagtcggacggatcacctgaggtcagaagttcgagaccagcctggacaacatggtgaaaccccgtctctactaaaaatacaaaaaattagccaggcgtggtggcacatgcctataatcccagctactcaggaggctgaggcagaagaatcgcttgaacctgggaggcagaggttgcagtgaacccagatcgcaccattgcattcctgcctggatgacagagcaaaactgtctcaaaaaaaaaaaaaaaaaaaaggaaaaaagagcaactggaactctaatattgctggtggaagtgtaaattactccaatttggaaattttgtgtgtgtgtgcgcgcgcgtgcatatacacgcgcacccacatctctttccatggctttgcaattctgcttccaggcatatacccaacagaaatacattcacccaaacagtatacaggaatatccatggaagccctactgtaatagcctcaagctggaaacaactgaagtgtccatcaacggtagaattatgatatgttcacagaacaatgagaaaaaacaaacaactgatacatgcaatagtacagatgaatcttatgttgagcaaaagcaggaggcataaatgaatacatgggaaatgattcgttttacataaaattcaaaaacaggcaaactatggtgttcaaaatcaggatagtggtcatcctgtgaggtaggattacagatggaaggcagcccaaggggcttctggtaacattgtttcttactctgaatgctgattatgtagatatgttgactttgtaaaaattcatcgaactgtacacttataatttatatacttctctagttacatttgaattaaaagtttatatgagtgttgtgttttgttttgagatagggtgtctcactctgttgctcaggctggagtgcagtgttgcgaccatggctcactgtaacctggacctcccaggcttacgtgatcctcctgccacagcatgccgagtagctgggactacaggcgcgcaccaccacacctaattttttgtatttttttgtctagatggggtttcatcaagttgcccaggctgatctcgaactcctgggctcaagcaatccacccgcctcagcctcccaaagtgctgggattacagacatgggcccctgcacccagcccatatgacagatttttttcttttcttttttttgagacgcagtctcgctctgtcgccaggctggagtgcagtggcgcaacctcggctcactgcaacctccgcctgctgggttcaagcgattctcacgcctcagcctcccgagtagctgggattacaggcacgtgccatcacacccagctaatttttgtatttttagtagagacggcgtttcaccatgttgggcaggatggtcttgatctcctaacgtcatgatccgcccacctcggcctcccaaagtgctgggcttataggcatgagccacaacgcccagccaatgacagattttttaaagcacctagtcaaatatttgtaatttgtaaaaaataacaaaaaaataaaaaataaaaccccattttgaccccacattctccccctccccagtaaagctctttttctgtgatctcctctaaatcaaatttctccaaatatttgactccactttttttttttgaaacggaatttcactcttgttgcccaggctggagtgcaatggcacgatctcagttcactgcaacctctgcctcccgggttcaagcaattctcctgcctcagcctcccgagtatctgggattacaggcatacaactccatgcccagctaattttgtatttttagtagagacggcttctccatgtcggtcagactggtctcaaacacccaaccacaggtgatctgcccacctcggcctcccaaagtgctgggattacaggcatgagccaccgcatctggccgactccactttcttaacctctaattcactcttaaaccttctccaatctagcttgagccaaccaccattcctaatctcttcaaggtcaccaaggaattccaagtggccagatctaattgacacttctctatcctcatcttaatctctcagcaatgctggacacaagcgactctccccctctaaacatctcttagcttctagcactctgcccccgtggctttcctcctacctcaaagcctttttgctgcttcttacccctccctctgttcttaaatgttgtgagtgtccaggctgtcttaggcctccctctccaaccacacctcaggttgctttaaatacctttcttggccgggtgtggtggctcacacctgtaatcccagcactttgggaggccaaggcgggcagatcacttgaggtcgggagttcaagaccagcctggccaacatggtgaaaccccgtctctactaaaaatataaaaaattagccaggcatggtggcaggcacctatagtcccagccacttgggaggctgaggtaggagaatcacttgaacctggaaggcagaggttgcagtgagctgagatcatgccactgcactccaacctgggcgacagagcgagactctctctcaaaaaaaaaaaaagtaaaaaaaaaataaaaaatacttttcttaaatcaaagatgcataaattcctaccttcatctcccctgctcctgctggtgggttaaaacatcatctttcatatattaatcacatttccctccttaggccctttagatttgttgtttgttccttctgcctggattggtctccctagaacttcctatgcttagctccttcttgtcatccaaacatcagctttaatgtctttttttttttttttttttttttggtgtgtgtgtgtgtgtgtgtgtgtgtgtgagggagagagagatagggtctctctccaagctggagtgcagtggcttgatcatagctcactgtaatctcgaactcctgggctctaaggatcctcctgcgtcaggctcccaaagctctgggattacaggtgtgagctaccacgaccagccttttaatgtcattttctaatttcaccataacatttggtattagctgatattatttgcttatttattaactgctttccctaactagaatagaaaccccatgagggcagggactttgtgctctaccgaatttccagagtctagaatggcttcttgggtaaaagaacagcctcctaacgggtttcctagctttaattcttgcctctatccacctatttctccacaaggcatcacccactgccctcctcccctcaacacacacacttaaagctctttaatgttgcttgttcctagaagtgatcttccttggatggattatccaaggcatccacccaatgaaagaaatcatgttaactctttgtacataaaaatgtttaaaaactcttcaaaaaaaagttctttaatggactcctattgcattttagaataaaaataatcacttcttacatggttaaagaccctgaccacttctccaattcatgccgtgctacttttctcactcgttaacttcaagccatagtgggctggtgtgtgaagaaccgaaaggtagtgtgacctttcggttcttcacaccgagctggtgtgtgtaaatgggggaggactcctcatgtcggtgatacttgagatgagacctgaaggctgagaaaggattttttttaccgcatccagctaaaaattataattctaaaatgatggctgggcatggtggctcactcctacaatcccagcactctgggaggccaaggcaggcggatcagttgaggtcaggagttcaagaccagcctagacaacatggtgaaaccccgtctctactaaaaacacaaaaattagtggtgtggtggcacatgcctgtagtcccagctactcaggaggctaagggagaagtatcgcttgaacccgggaggcagaggttgcagtgagccaagatcacaccactgcactccagcctgggccacagagcgagactccatctcaaaaaaataaataaaataaaatgccaatgacctacatgtttcataggcattactggctggaaagcccaaggtctctctcctctctctggtcacccaaagcttgggtttcttaccacccaacgctcttggtgggacaggccctgacacagctgatttataccaacagcataattaaaaaatcacaatgtcctgagaactcacctgaaatttaaaatcatctcttaacttggaaggctgcttacttttaaaagtaagttagtctggcaagcaacttgaactcctttgaaactgtttactggaattttccagcaaacctgcctgaggtacccaccctgacttgtaaagatttaaaatgctggtgacaacacaatgagcataaaataggacaactgttgcatttgtaagtaagcagcctgctgagtaaaccatactactaactggtctcatatgctgggggtgggacaatgaagcatgttctctgtgatactatttctgagatatttattttagaataaataattcggtggccgggcgcagtggctcacacctgtaatcccagcactttgggaggccaaggcaggcggatcacctgagcgcccaggagttcgagaccagcccagccaacatggtgaaaccccatctctgctaaaaatacaaaaaattagctgggcgtagtggcatgcacctgtagtcccagctactcaggaggctaaggcaggataattgcttgaacccaggaggcagaggttgcagtgagctgagatcacatcactgcactccagcctggcgacagaatgagactccatctcaaaaaaaaaaaaaaaaaaaaagaaaagaaaaaagaattcagaatacctaagtcatagagaagacatgtatatggtagaactttagaatccaaggcctgaattaggataaagagccctgctgaagtggtgcatgggctggacataaacaaggaatatttcacaggccagaactcaggggaggaaaacatttccaaagcttttaatactaatagacattttctatcctccaaggcagtcctttggatatgggtaacagataaatgcatatttcctaggtaagaattttattttaggtctaaagtttaagaagacagaacagttggagagaaaggtggggggaaaaaaagctgttcccaagtatgttttactttggctttaaaatcagtcagacctgaccttaaatcctggctctaacactgaataaatgaatgagcttgagtaagctgccactaggagcttcagagtaacaggaatacattccctacacctcacaggctggacatagaggtggtgctcagtataaagggggatcataacttcactggacttttcaatcttacatcaagagcagagggcagtgttagacattcagtaaatagccgtcattataataaggcatgggctcatgaggattaaatgtttgcctctctccaaaccagcttccagagcctcctttcacacagagatgtcagtaacatcaaagacacaaggactagagcctcttctctcctccagtccccaagttatactttaatgtaaaggatcaaaactttagacatgacataatcttctgtgctattatttcagatggcagacacggggaaaattgggggagttattcagaacttggggttcctgaagtcctttctcagaagattacaaagtaaaaacattacaaaacacctaaaatgtgccaagttagttgttatgtttgcatctgttgtcttatttaacacaataatcctacaaaaatcagaattaaaatggtctgatttttgtaggattcaataaaaagtaccttaagcaccttgtaaaaagtataatacatagaaaaaccattcctgggactacagaactttaatttatacatcccataagtcatctgcatttctagtttctacaagttcagggtaccagtgatacagacccccaaccttctaaagataaagcctttaactgatatttaaggtgtatttcagtttctcttcttacttttgctccagttgagatttttctgacttaattgtctcaactgcaactaatgctctatttcattgattcatttattgagacaagtctctgtcacccagcctggagtgcattggcaccatcatagcaaactgtagccttgagcgatcgtcccacctcagcatcctgagtagctagaactgcaaatacccaccaccttgcccagctaattttttatttttattttttttgtagagacagggtctatgttacccagactggtctttgaactcctagcctcaagcaatcctacctgggcctcccaaagtgctgggattacaggcaatgagccagcgcacctggtctaccctccttttaataagtgttgtcagccaggcgcggcaggctcacgcctgtaatcccagtgaaaccttgtctctactaaaaatacaaaaattagccaggcatggtgacaggtgcctgtaatcccagctgcacggaggctgaggcaggagaatcgcttatctgggaggtggaggttgcagtgactcgacactgcaccactgcagtccagcctgggagacagagcgagactccatctcaaaaaaaataaagtaagtgttgtcactgggtaactagtaaataataatgaaagcaaatccttagtgctcagggccttactccttactctatcctattctttcagttcttcaaacaccaaggttattttggctttaggaatctccctccctcaagctattcagctattctctcagcctggagcactgttgccacctcacctcccttacatatcatttatttcctcagggaaacctttcctgatcctgtctgtgctctcataacatttttttttttttgagacagggtctcactctgtcacccaggctggagtacagtggtgcgatcacagctcactgcagcctcgatctcccaggctcaagtgatcctcccacctcaacttcccaaaggattggaattacaggtgtgagccaccatgcctggcctcatagaatcttatacacttccttataaccataattgatttatcagactatttagcatgaatctcctgtacctctggagaacgtaagaggaacaacaacaggcaaggtccttgaatctcataatgattacattctgggggaaagagcattctagcagtactgtatctaatcaactggctaacagtttgtataattcttttttttttctttttttgagacagagtctcactctgtcgtccaggctagagtgcagtagcatgatctcagatcactgcaacctccacctcccaggttcaagcaattctcatgcttcagcctcctgagtagctgggattacaggcacgtgccaccatgcctggctaattttttgtatttttagtagagatggggttttactatgttggccaggctggtcttgaactcctgacctcaagtgatttgcccgcctcagcctcccaaagttctaggattacaggcatgagccaccatgcccggcctatataattctttttaaagtatttttcttccatatttagggtgtggaaagtgaaacaggaaacaagagtaggtctatttcacagctttattctcagccttaatgccaggtaatcaacacatatttgttgaattattaactaatgataacagcaatagagcgctttttaaaaaaaaaggacagaaattcatgcttaaaattgcacaattggcgaggcacagtggctcacgcctgtaatcgcagcactttgggaggctgaagccggcggatcacctgaggtcaggagtttgagaccagcctggccaacatggcaaaaccccatctgtactacaaataaaaaaattagctgggcgtggtggtgtatatgcccatagtcccagctactcgggaggctgaggcaggagtatcgcttgaacctgggaggcggaggttgcggtgagccaagattgcacactgcactccaccctggctgacagagtgagactctgtctcaaaaaaaaaaaaaaaaaggacagaaactgcacaattatgattccgggatgatcagtaaattaaggattttaaacacacataaccacagcaataccttgaacgaaagactgaagagaatttctttgtctgctaagattacttgaaaaacaaaagaaaagaaaaatggtttaaattgttattacagaaggacaaaaccagaaaaggagagcctggaagaggaacaagacggtcacttccatctcttcctaaaaagacacagaaggcttcaatgccttcactgttgttttggattggaatggtgctgcaatgggaactgcaaatacaaataaacatgaaaacaacaaatgcagatgtaaaataaagacatgctagaaatcaaagaaaccgacctctaccagacacacccaggtctgggtgtacctttgcctgttcttcccgacttgcacagcccaagcaaggtggaaggagaaacataacaaaatgatacaggaaccagagagcagagggtcttggagcataaactgttaaaataataatatgaataagggggaaaggagagagatttcacttcccactagcaataagtgagctctttttcttaagcggtaactgttaacaactgaaagacatacataataatcacaagttataaatgttctcagaaactccctggtttcaactattctatgacaaatatctgcagagggacctcagcatctgctatgaagttcagggaaaagtaattctaaccaatggagctgtgccaaaatatcacccctggggtctgaccaattaaatggctgcttcttagtgtggagtttaggagagatgacagattgaacaccgcagcagagaaacctacgctttcatttcaacccaggcattctgccccaaagggtgagtcaatcaggaaacaaagcaattcagagtaaagtcttctaacaacgctgaaaacagaataaatggacctgcagtttaattacagcaggatccttcttccatcgaaactgatgacaaagctcatcaagaataaagagactctgatccccctactactctggtgcaggaaagaggatttaccagataagctcttctggaccttctactgaagaagctgctttcacaagatattatcacaatgactgactaatgggtaaccaggatttttttttaaatgaaggcagggactaggtgaaggggtttctggcactccaatgcaccgggaaaagaaggcatttccagacaggaattctatctaggctcaaaattatgcaatttacctttccaaagtggactgcacgaaaattactgcagccaaatgtaccatggtatagaatgaattctggtgttatttaactcctttaattaaaacctgctacattgaaaagataattgaaaggattaaaataacgcatgtcaaagcatttaacccagagcccagcaaataatggatgttcaacagaaattggctgtaaataatttaaagaaagtactttgttaaggttgtttttgttgttgttgttgttgttttaacacagaaaggcccattaaggttcttaacttttttattttacttagttttcagacagggtctccctctgttgcccagactggagtgcagtggcatggtctcactcactgcaacttctgcctcctgggctcaagtgatcctccaacctcagccttctgattagctgggactacaagcgcaagccaccatgcccagctttttttttttttttttaaatacagagtctccctctgtcacccaggctggaatgcagtggcgtgatcttggctcactgcagcctctgcctcccaggctcaagcgattctcatacctcagcctcccaagtagctgggattacaggtgcccaccaccatgcccggctaatttttgtatttttagtagagacggggtttcaccacgttggccaggctggtctcgaactcctgacctcaagcaatccattcaccttggccttccacagtgctgggattataggcgtgaaccactgcactcagcccattaaggttctttaaaaagacgtttatcagttctattcctctatctatctgctttttaaaaatttaggggccgggcacggtggctcatgcctgtaatcccagaactttgggaggccgaggtgggcggatcgtgaggtcaggagatcaagaccatcctggctaacacggtgaaaccccgtctctactaaaaatacaaaaaattagccgggagtggcggtgtgcacctgtagtcccagctgcttgggaggttgagacaggagaacggtgtgaaccaaggaggcggagcttgcagtgagccgagatcacgccactgcactccagcctgggcgacagagcgagactccatctcaaaaaattaattaattaattaattaaaaaaataaaaatttaggtatgccaatacctctaatcaggttcagtttagtttttgaaccactcctctaagaattaaatgactacagttcttccaccagttcttaattatataatcccttgaaaaacttctcagaggtggtcagagtggtttatcctccttgcagccccaggctgttaaatctcttcccaattccaccccattgctaatgagtttgttactccccacaaccctgcagtccagccagtttagaatttctcccttagctcctcaacccttctctgccaaattcaaagaatgaacgtatgcctccggcctccacctgatgcactgtaattgcttgcactgcactgaagtcagataggatttggtgataaatccaggatgaattcagactaagcacccccttcctcccacagacctttagcttggtttgatgtttgatctcaatctgaaaattatgctgactttctgaaatgttttctgctcctgccaggaggatgtgatctacccagtatctacgccaagcagcagaaatgaatggtgatttctagttctcttggtgtcacaaaaacctttgtattttcaccatattctctccttgccaagaacacctgtgttcagcctatcttcaaggttttactatttgcctatatcccacaacaaaatgcaaaatgcctcatattcccaccctttgataagagtcaagaaaaaagacacctgtgctgatagcagaaaggcatgttgttctcactgctttcacacacagtcactagaccatccacactgagatatgctgctactttacccttttgctcctggaattacaaagtggaaggacagatgattttctctgcaatatggtaagggtacagaatgcacacacacacacacacacaaacacattatcaaaacctttacctgtcccatattatagtatgagaccagcagaatggacctggttcaagtggttgtgataatctacaaagatcctgagatgactcgagcagatggttatcctataaccaatccagtcctctaatgaatgcaatagagcagatttcacagtaggaagcaatgggaaatgggaggtgggttcagaaaataggggctgctgagattgtttatcagctgagtgaccccaagcaaattacttacttaatctcttctccagagacttgccaaggggtgaagcaattcagcagctagcattagatgcagcctccagtactcaaagagagtttgaattcaaagactaaaaaaagttcacaaacacccggtagttatttgtaaaccaccacactcagaaaacactcaaaagataggctaaaaattctggaaaccaacaaaagcagactgttatttaaaagaatgggccaggtgtggtagctcacgcctgtaatcccagcactttgggaggccgaggtggactgatcacctgaggtcaggagtttgagaccagcctggccaacatggcgaaaccctgtctctactaaaaatacaaaaattagccaggcatggtggtgggcacctgtaatctcagctactcaggaggctgaggcaggagaattgcttgagccatggaggcagaggttgcagagagctgagatcacgccattgcactccagcctaggtgacagagtaagactccatctcaaaaaaaaaaaaaaaatgggcctgttgtagtggctcacacctgtaatgccagctactgggtggctgaggtgggaggatcacttgagcctgggagatcaaggctgcagtgaactgtgattgcaccactgcactccagcctgggtgagagggagacccagtctcaaaaaataaaaattaaaaaatagaaggtggtggccaggtgtggtaactcacacctgtaatcccagtactgtgagaggccaagagaggagaatcacttgaggccaggagtttgagaccagctcgcagcctgggcaacatagcaagacctcactctggtgtcaaggctggactgtagtgatgcactcttggctcattgctgccttgacctcctgggctcaggtgatccacccacttcaacctcctgaatagttgggactacatgcacatgccaccatactcagctatttttatttttgtagaaacggaggtctcactatattgcctaggttggtctcaaactcctgggctcaagcgatcctcccgcctcagcttcccaaactgttgggattacaggcatgagccactccccaggctctacaaaaaaaaaaaaaaaattaattaaaataaaaggatggaggccaggcacaatggcacatgccagcactttggaaggccgaggcgggcagatcacctgaggtcaggaggttgagaccagcctgaccaacatgtagaaaccctgtctctactaaaaatacagaatttgccaggtgtgatggcacatgcctataatcccaactactctggaggttgaggcaggagaatcgcttgaacctgggaggcggaggttgtggtgagccaagatcgtgccattgcactccagcctgggcaacatgagtgaaattgtctcaaaacaataaaaaataaataaaaaataaaaggattgtgaattataggctaaaatttcccattgttatttaaaaaaatagccaaacacagactgaatcccatatctaccaaaagtaacatcaacagtcaattcagtggcttcattttataaaccatatggatgcagtacagtataaactaggataaacaaccatgcccaggaagaaagaatggtccctacaagaaagacatgcatatgggtaaaggcaagggctgtaaaggactagttatgttagcttcttttcaaacccaaaatggagacttcttcagccaagctcaaatactagaagtcttgactttttaacagcaccaagtttcaaaacacaggcacacgagttacagcagacaaacacatcctgtttgcacttgacttcctgttttgggctatctgatctctttccaccgctgtaccctagaccttcaacaagtaggtaacctttcatatctgctgccaactggttcactagacagtatttcagtgacaataaagtacattattatatgagtcaggtaaaagattcacctaacaagcaccaaaaaccaatcatgagtgtctaagacactttctggatttcccatgcttcgtactgacatctgacttaagcaataaaaacttaacacaaatagtgctgagataaggaaataaagcctgaaacaaaacttcgaatatgagggctgggaaaaagagcaagaaaaattgaaaatgttttaataattaaacgctggccccttttcaaatgcagaaggaacagattcccagaagggagtgactgagacagttaaacagccctttcgtgaacactgcctcaaatccaacctgctaccaactggacaaagtctacttttcagcattgcaaaagccttcaattttagacacctaaagcctccacttcaagtgtaactttccactactttcaaagatttggtggtttcccaggccacattcagttctagaagtaaacactgggcaacaaataccccagcttaatggacaagtcatttagcctctttgggtctgttttctcatctggaaaacaggaaggttgaactacattcatctctaatgttttctccagctgtagaaaaatttgaggattcaatattaacggttagcagaagtttctgtggtttcctgcattatttctttggtcaaataagatgcctttgacatcccacatcccacactgtgaataaaatgccctgatctacctccccagtaccggaagattttttttccctttccctttcacttgaaacatgcattggaaaatttccctcttgaaagcaatatactgacaaattttaagtactgttctttatacatggtcttttattaagatgttaatgtaatcaccagtcaattcctatgctgctcatctgattcatgggggaactcaagccacaaaaggatggagaaaatctgaccagcagcatgtggcacacccacatagtgactgctaatgaggagagaatgaggcaaaatctgggtaaaaaaaagggggtggtaaagagaagttcagtgagtcagtgcaagggaaaacacaggttaatagaaaagaaagaaaaggaaatgtgaaaggaagaagaaaagcaaaaaagggagggaatctataataaacaatgagtagaaacttaaaaacctgaaattctgttcagttattcattcattcatccaatagatattgaatgcccactatgtgcagggaactgaactagatactaggagaaagacaaaggtcaaccagacagatctgctcagtgaggccatggtctagtaggagataggtaggtacacaaacaactataatagatggcagaaagtgtaatgtgccacaaaggagacataaaagagaattctctgctatgagactcaggaagaagtgattactcccagtgagggatcagactagggagccttcatgggaagaatgacattccaagccaaaagcacaacagaaacaagggtactcaagtaggaaatcaagatcatacaggagcagtgagtaactggcaatagctagtgatccagagagccatgtctaaattggataggtggactggagccagactgagtattcagaaattggcattagtatctgaatttaagtctagtggaagaggaaggggacaggaaggagttgatggactaggagctggaagaaactcaaaaacttaacccataaaattaagataataaaatcaacacaaaatcaatgtgcacagatatgtaaagttcctccaaagagacagagtatcttccaaaccaaaagcaagaagaggacaaaaaggcttggatgactatattaatacacgggtatttaaacaaagaatgtgaccacatctaagactggttaacaaagaaatctggaaaaatctagaaaaaacagggaggggcattttgactccagaactgcccaaagccaagaaatactagagataggtgacacaacatcttctctgcagtggaacaaggttatttcacaaagcttagatgggtacagcatatagtagcagctaggggtaggggctcttaggggcagagggacttggttcaaatctcagttcagcatcttatcagcttgaagagagcttggtttcctcatttgtaaattgaagataattgtacctactttgcaggaggatcactgggacaatgaaatgccctactgtatgcaaagtacttaatacaataccaggcattatgggaaacaataatcttttttgtaactatattctcccccacaaaccattctatcttataaatccatgctcaccaagcaagcttgatattattaaatttgattgccagatctcttgatattgaaaagcaattatcctaacaaattccagaatcccgttaacggaaaaggaatccttcattctaaaataataaattggcattccattctgagctcaatcactcaagtctgaatacaatcctgtcttcaagactaattatttccaggttctccacaaaatacattttgtgacccaagactagactgacgacacagtgaccaaaatcctgaggggtcatcctgagaagctagattggcaccaccctggccagccctacctaatgccaccctcgctctacaagctaacttgtataatactttcccatacttctccaccttccacccctgtcatacccttcaatcaagcactatagtgaagcactttaccttcctctctaaccgtgtagaggtcaaatacaccatcttatccatttttgcattttcctccatatcccaatataacttgcatcaaaagaaccacaataaatatttactgtaaaacacaattttgcttaacaacacaagccattgcattccaccattcccacaagctgaggcctctttctgatttatttttcccacatcagatgggtaatgcactgactttgtagtaacaaggcttgatggaggcacatctcatacatgtgcatgaaaatccaatcattacacttatgaacaacaaaataatcccctttctaatttactgaactcttactctatcttttatcttcccctccctcccccacctctccattcctaaactgccagattactatagaaaaatcagaagactttatttaactgggttgctaacaaattcatacagctggggtaagccatcactgggctctaaaaacctttcattcctctctagctgatgtcctgatagggctttccaaagagcagtgtcatgcaaggtttaggagcatggggcctgggtcagacagaactcatagtcttctttctgtgtgacctgttaaggtgattaattccctaagcgtcatttttctcatctgtaaaatgaagtacctaaaagaggtcattcacacaaatccttaacactaacacagtgacaggcttagagtaggtgcttagtaaacaccgatccaacagctttttttttttttttgagattgagtcttgctttgttgcccaggctggagtgcagtggcgcgattttggctcactgcaagctccacctcccgggttcacgccattctcctgcctcagcctcctgagtagctgggactacgggtgcccaccagcacgcctggccaatttttttgtatttttagtagacacggggtttcaccgtgttagccaagatggtctcgatctcctgacctcgtgatccacttgcctcggcctcccaaagtgctgggattacaggcgtgagccacagcgcccggccaatggtcaccaatgatcttctgatggataaatgtgtgattctttcctatgtcctcaaccttcatgactccctgaagccccatgcacccaaaacctacccaaattcttcattatgaagctgtcttcagagggttaccaagaactatggacagaaatataactttaattaagcattaggccaggtgcgatggctcacctgtaatcccagcactttgggaggccaaggtgggcggatcacctgaggtcaggagtttgagaccagcctggccaaaacggtgaaaacccatctctactaaaaatacaaaattagccaggtgtggtggcacacacctgtagtctagctactcaggaggctgaggcaggagaatcacttgaacccaggaggcagaggttgcagtgagccgagatcatgccattgcactccagcctgggccacaagagcaaaactccatctcaaaaaaaaacaaacaaacaaacaaacaaaaaaaaaacattaatcaggctggattttgacacatttccttgtaactgaaagtcacacagcgctagatactgaccatttgcatccctattgtttctaaagatagtatctctgacattagaagcataaggctttttttttaagaattgcttgagatatttttcagatcccaaattctggtaaaacagctgatgccaaccagtttgaagaccctcagagagaaataaaatcagcataatacagttttttcatctccgggtcccattacttcacctttctctctctgaccacccaacaatctccacattccagcccactccaaaatccttaaaaaccctagctccaaactcctcaggaggacggatttgcagttccctctcatctcctcattctgcagcccaacaaataaaccccgcccccaggtcttgggtattgacttgccacacatcagacagcacacttactctggatacacttgaattccccttacagactccttctcccacactggctcccactgcaagcgtggtagcctgacttacctttgacatcaatgaccactcttgctcccttattttccttccctggttccttcttttgccccctacataggccctagggttctgtactccatactcttccttcttcctttccttctctagtgaattttacttctacttttttttttttttttttttgagacaaagttttgctctgttgcccaggctggaatgcagtggcatgatctcggctcaccacaacctccgcctcctgggttcaaatgattctcctgcctcagccttctgagtagctgggattacaggcatgcaccaccacgcccggctaattttgtatttttagtagagacgggatttctccatgttggtcaggctggtctcaaactcctgacctcaggtgatctgcccacttcagcctcccaaagtgctgggattacaggcgtgagccaccatgcccagcctggttctactttttaaatgcatcctgcaactatcccgttctatgtccactgccatatcctgccctatctgcgatgatccttctcaagaagggagacaaacacttccttactggtcccttctttgtgactctctattctctacagagtagccagggtaaccttttatttagaaaaagaatctttgcttgtcactttctgttttaagccttcaatggtgtcccaccaccctttttttttttctttttctttttttttgagacagagttttcacttttgttacccaggctggagtacagtggtgcaacctcggctcactgcaacatccacctcccgggttccaacaattctcctgcctcagcctcccgagtagcacggattacaggcataagccaccatgcctggctaaaattttttatatttttagtagagatggggtttcaccacgttgaccaggctggtctcaaactcctgacctcaggtgatccacctgcctcagcctcccaaagtgctaggattacaggtgtgagccaccatgcccagccccaccacacttttgagtgaaggctagactcactatctagcccacaaagtccccatgtgatgtgggctctgcttgccttttccactttacctcatgcagctctcccacttcactcaccttgctctgtccttcggtcaccttccttcaattcctcaaaaattataaattatttattgccccagggcctacaaacttgggttccttttctggctgaaacattctccctagctcttttcacaagactggctccttctcagactgcagttcaccttccctataacatagctgtctggcacacagtaggagcttaccaggtatttgtgaaaggaacagatttcacattctccagtcaggtaactcccaaaagtgaatatctggaatcaatctcacccttcagatcagtgcttcatttctaaatgcctgctaaatttccatacctcaaacttagcatactagatataaaaccaactcttccattttcccaaaccagtttctccagttttctgaaattacatgagcaatatgatccagtttccacttcagaacaataaatttcccattcatttgctctacctgtccaaaattccaatcacctttaaagctaaattcaaatatcacttcattcaatcatgcattcaatcaaccacttattcattcaacaagtacttactgagtgccttttatgaggcagacactatgttagatactcgaaagcaaagcagatgtatttttgtctattatacatcaaacaatcatataaatattgaattatgaactaaaaaaaaagtaatgaaggaaaaatgccagaaaacatgagaaaaaaatgagaggcatcaagaaacactgttctgatgatgggctgatttaatgaaatataatttacactaggcagactggaaagaagagcatgctagataggattcaatcaagtcctagaagcaggagagatgagatctatctcaatgtacatatcatcttgccttacatattatatctatctatccccccccaccatactcattttactgatagttacctgaaagaaaggacatagagtgtctcttatgtgccaacacaacacccccaggagacactgagtcactggtctggtacctaggagcttatgcttgtaaaaagctcccagatgactctatatgcagccaaatttgtaaatcatatgcccaaactacccatttaataaacatatattgattattctttcatgaaaaatctctaaggtcagtgtggtaaattgtatctaaaattggtggtaggccaggtgcggtggctcacgcctgtaatcccagcactttgggaggccaaggcgggcagatcataaggtcaggagttcaagaccagcctgaccaacatggtgaaaccccgtatctactaaaaatacaaaaattagccaggcgtggtggcaagcaactgtaatcccagctactcaggaggctgaggcaagagaatcacttgaacccgggaggcaaaggttgcagtgagccgagattgcgccactgcactccagcctgggtgacagagcgagactctgtttcaaaaaataaagttggtagtaataatcccaatcacattgcatgcccttttgcaatgtgatttttaccctctatcctttagaggtgaagtcaatgtcccctcctcttgtatctgggctataattgtgacttactctgacaaaaagaatggggcaaaagtgatgatgtatgactgccaggcctaggtcttatgagatcctgcagcttccattatggcccagccaccatgtaaaagaagctcgagctagaatttttttttttttttttttttgagacggtctcgctctgtcacccaggttggagtgcaatggcacaatcttggctcactgcaacctccgcctcccatgttcaagcaattctcctgcctcggcctcccaagtaggtgggattacaggtgcccaccaccatacccagctaatttttgtatttttagtagagacggggtttcaccatgttggtcaggctggtctggaactcccgacctcaggtgatccactcacctcggcctcccaaagtgctgagattacaggcatgagccactgcgctcggccactcgatataggtttataagtgatgagagaccaagaaagagaactcacagagaaccaagatatcccagccaacagctagctccaaaggtacagacatgtgcagccttcttggatcctccagctcaatcagcatcatatgggacaaaaaaaaatatgtcctcctttcctgaattactaacccacaaaatcataggcaataaaatggttgtcatgttatgccaccaaaagtcttcgggtaatttgtcacacaatagacaactgaaacagtcagaaattcaacactctcttgggcagtcattcaaacatttccccactttgatgatcaaaaaattctttctcgtattcatcaaaattgctcctccttcaatttaagaccatttcctcttaaatctttgaagttcatgaagaataattaataaaaatccccctggcaaaactattcttgtatttgaagatgataatgaagttatctcttagcttttctttctctaggctaaaatctttcccccctttttaaaacttataatgataagacctgtttttcaaccttttaatcattttaattatcctctcaagtatgagagacccaaaattgaacaccatatgccaatatctaacagagattatttcctagctctaatggttcagctttttataatggaatttctcatagtcccaaatatggcattttagcactccaaaagttgtgaagtgatctaaaaagttaattacttactataactgtaaaaggttttctgcccttaacactcagcttactccattttgggatgaccgctttcactcaccagcctggtttgatactccaccagggcagcaggttttcacaacttccagatatttgaagtataaaagaaaaacctgagaggttggagtacgcacaccattaatttcaatcaaggtctctaaccacaaccagggccttcccataggtcaggcaggttcagagtacctcctcctcctaccttgatgataaagtggccttgtaaaaggcaagaccgttagcacttgcctatcgagcaaaggcaccatttctgtggaacctgatagagtatatttaactactatattaagagacaaaccagctgcttaatgcagtgtaagaaccatgttttctctctgagtcttacctaaatgtatatatgctttggtatcagactagctttataatcactggtaaaatagggataataaataaagcctacccaacgcaaataaaaccatatgagggaaataattttgtaaaacaccataaaaatgtcgtgatattgcgggactagatctcagcaaaccctttaaatcttcaaattaactttgaatgattacttgatggtggcaggtaacacatacaaaataagcagccatgggctcatgttcatcaaataggaatgaaaaaccatgccatctaacaaaaaagcttctaatattgcaaagaataacggtttgagcccggagatccacgtcagccactctctctgatggtgccaagctctagtccagggacaccaagttcagtcaaagaactcaacagtctagtggaagagacagacagtgctgtctgtcagaaaagacagagaagtcagagaagatgcatatatgaactaagtgtcctgagggatgagtatcttgccagttagagaagggagagtccattgggaaaaggcagagtcctaaaagacatggtatatccatggaatgttaacatgagaagttcagtgaagctggagaggagagaaatggccaggggagagggagatgagatggttaacagcaacatgtaggaaagaatccaactgtgaaagcttttagaagtcaagctaagtggaaaacagggaacaaatggcaccttaaatgaaaagattagatgtggactttaaaaagataacttgggcaacaatatggagaagataggagcaaggaaagacttatggaggagtggccatttgataagggtctgaactaggagttacaaactcaaattcctagaggcaatgcaggtaaaatgctaagtcttcagtgtgtaagatgtcagaaaatggtggtatccgtaatctttgaagagtacaggccttctctctgatggtgcctaaaagtattcacacacaaaattttaagcccttaggctgactgattgatttttgggatggagtcttcttctgtgcctaggctggagttcagtggcacaatctcagctcattgaaacctccacctcctgggtgcaagcaattctcttttctcagcctgctgggtagctggtaccacaggcactggccaccatgcgtggcgtgcctttttttttttttttaaatacagacagggtttcaccatgttggccaggatggtctcaaactcttttttttttttgatatggagtctcactgttgctcaggctggagtgcagtggtgtgatcctcgctcactgcaacctccacctcctgggttcaagtgattctcctgcttcagcatcctgagtaactgggattataggcacgtgccaccacgcccagctaattttttgtttttagtagagatggggtttcaccatgttagccaggctggtctcaaactcctgacctcaggtgatctgcccacctcggcctcccaaagtgctgggattacaggcgtgagccaccgtgcccagcctgactttaaacgtccagttttgacctctggtaaattaaggcaatgacagtgggaatgaagaaaagccacacatcaaacagtactccaacaaaatcaacagggtttagcacatttaaagatgtgagcataaaaagaatgaacaaggccgggcgcggtggctcacacctgtaaacccagcactttgggaggccaaggcaggtggaccatgaggtcaagagatcgagaccatcctcgccaacatggtgaaacactgtctctactaaaaatacaaaaattagctgggcgtggtggcacgtacctgtagtcccagcaactcaggaggctaaggcaggagaatcgcttgaaccaggaaggcagaggttgcagtgagctaagatcacaccactgcactgcagcctgggtgacagagcaagattcctctcagaagaaaaaaaaaagagttgatgagaggatcagagttgagaaagtacagtacaggctcttgctcattctacccttactgagaacctactatgtgcaacgtaccatggatacaattctagcaaagcagaccctgattctcaatacatactatgattggagtaaataccaggttctcctgagtactcaaccctggtaagtaagaagaggcttcatggaagaggtgacttctaggctgaaaccagttggccagattaagcttggggaaggtgtgtaaaagaacgcttacatatgctaaggtctgaggtgaaagagaacgtgggcaatttgttggaattataaggagcagaaacgtaatttggagggtgacgactacctagagatatcatagtctgattaggtgaaggactcaaaagtttggcgatgaaaagcaggagggagatagagtagtagcctagtagaattagagatgagggaggttcttcctattaattcagaaaggaatatgggaacaaactcactgataagacagtgttctccacaactcaatatttagttattaggaaggcaaccaaatgccttcacttcttttcctttaacaatggcttagtttgactaaagtgtttctcacaagatacacacaaaaaaacaaaatacaagagcaaatgacggataaagctgtaaacctaacgttttacttttctaagatttatataatcagtgatttaattggacctaactccacatccagaactcaaatgaaagaaaacttctggccgggggccgtggctcatgcctataattccagcactttgggaggctgaggagggtggatcacctgagcttgggagttcgaaaccagactgaccaacacagcaaaaccctgtctctactaaaaatacaaaattagccgggcatggtggcgcacatctataatcccagctacttgggaggctgaggcaggagaatcacttgaacccgggaggtgaaggttgcagtgagccgagatcacaccattgcactccagcttgggcaacaagagtgaaactccgtctcaaaaaaaaaaaaaaaaaaaaaaaaaaaaaaaacctgactcacttctgaagacaggattttcccagtttctaatgcagcttcatctagctaatgaaacttaagaaaacagtttgaggttacctgattttgccagtttcaaaacattgccacgacagaaagcaagctgtctctagttcctgtggctgaggtcgctggagccatgttcagatgagatcatctcaggaaccaagagcagcggctttcatgtgaagtgaatggtgccgcctggggatgtatctttggtaagcaagattgcaacacagcagggagtttacccagggcagtgctgactcacgctgggcaaaatttgtacttcccaaacaactcagcctgaaccaaccgcagtcaactgcaacctaggaaagaagaggcagctcactgattgttttaaatcaagtgctgattactgggggcaggtaaacctcattcccccactactggtaacttggccacctccagagcccttacccaaaaagttccagtggccagtttctaaaatttcatctgagaacaggctggggctggggccagcaagattactgaacatagcaggttcacagctctgaagatttccccaggaggctgataaataagtcactttgcatttacaaattagaacatctgggtcagtggactcagggaacttgcccagtcatcattagccagtcaaatcattagggtgaatttttgtcagttctaaccaggctcattgttcttttttcccactaggcctcctctgacctctctatttcttcagacaactcaagttctctcattaagatagatgcactggaattttttttttttaatcagctgccacattctctatgctaaagccaaatcatttaccatcacacctactggatgcatagggaatacagaagactatgaaaatcaccttaacacttgctctgaaaagagacatccctaaatttatgtcaattctcatttattagcctgcttatttaaaaaatcaatctagaatgactggctcatcaacagctattaattactgaatttgccctgacaggctagaattgacattggtgttatacaaaaaaaaaaaaaaaagatcaagtccttgctttttgtgtgctttaatttgacaagagagaaactaaagttcctattagatccttctgtttcctgcttaaaatgtatgacagttccccaaggccatcagctatttcttagcagggcatttgaggcctctgcacccagcttcgttcatcctttaaggtaggtctcacatggcatgaactctggatgtagctgccaactcagcttgtcattcaataatgttaggttaattaaaatgtacgtgcagacagaatttgagtttaaaaactatactacttaattttctattcaaggggctagttttaaaaagttatttatccaactcacttaattctccttaattacattattccagtaggatagccacgctgagctttgataaggtattataaaatgttccctgttttatttcctccccttcagtgttttcctttcagaaaatggctttgtttaaagaagtttccctatagtacatgttaattagtcctttctgaatgataaacacatctttatagcagctgacaaccattatctcttcaaccacactttaaaaaaaatttctgtagttgatgataagttacaaattctagtatgaaacaactctcaaggtacagacaaatatggaacctccttcagaaaaaaaaaaaatgattagaaaagctcctgacctgttctgtatttgcgaactttaaataagagggccgggcacagcggttcacgcctataattgcagcactttggaaggccgaggtgggcggatcacctgaggtcgggagttcaagactagcctaaccaacatggagaaacccccatctctactaaaaatacaaaattagccaggtgtggtggcacatgcctgtaatcccagctactcgggaggctgaggcaggagaatcgcttgaacccgggaggcagaggttgcagtcagccaagattgtgccattgcactccagcctgggcaacaacagagcaaaacttcgtctcaaaaaaaaaaaaaaaaaaagaaagagaaaatccagacagtactatgcccaggagacagatacgaactatataaagagcagcctgaaggccaaaggcatggaactcctaagttgactaagagaaacaccattgagcaagtgaacagagctgctgcagcttatcattcccctctttgggactctgatacagttttaaccaactgccccaaattatagccacactccatcctagttcttccttttaaagtggaaaggttgaggattacattttagagcttaaaaaggtactcgtttgaactagtggtttcaggcacttgaggatttatgaggttacatgaaaattatgagaatatgaggctatgggagaaataataactgtggctttctgactaagttctttcaatacattattttaaaattagccaggcatggtggcatacacctctaaccccagctactctagaggctggggcaggagaatcacttgaacccaggagacagaggttgcagagccgagattgcgccactgcaatccagcccaggcgacagaaggagactccatctcaaaacaaaaaacaacaaaaacagaaaatacgttattttaaaactcaagtaacttaacacccaaaactatttatgctttttttaatagggtggtctcaacagatatttaatgagtgtgcatatgtgtatgtgcccattgtttcatttgaacagacatatgtgatgtcattgacatcccagatttactttcttttctgcaatagatcttgacattataaacaataagcaggtttcaaaagagaaattaaaatatccatttctcaggattctgtagtcttccaaatccacagaaaattaccaaatacatacagaagatctgggaggatgcacacagcagggagagcactgtaatgggaataaagatcaaatagctatgtttagctttatccaaattaccccccaaaaatcatgaatttttttacaacaagcatatattcaaatatgacttggtagtttaaaattcagttaaaattttaaagtttgtatcacttacaaactgctttactctctcttcacactctttcctctcaacatctcccttttatctacttccctacccccagcatcctaaatgatactgcacatttcttgtttttaacaaaattaatcttacttgtgtccacatcctttttctaactgagaagtcggtgaatggataaatgcacatttccaggaatcagtgcctgtctcaccttgttgataattaatgattgccaaattctaatcttggtgttcagtgacctcacagcctttttttttttttaactatagaacatagtatttaagaaaaacaatatgatggcaaccaaatatttatcatctaataaatcacagaaattaaacatgaaaaatgaagtaaactttatgatactcaacaattaactctaggggtacttaagaatcaacaggggtgcttattgaaaatgaacatttctcatcccagtccctcagacactctgaattagcagacatggagggaggccccagaaactgaattttttttttttttttttgagacggaatctcactctcatcgcacaggctggagtgcaatggtgcaatctcagctcactgcaacctccacctcctgggttcaagcaattctccttcctcagcctcccaagtagctaggattataggcgtatgccaccatgtctggctaatttttgtattttaagtagagacagagttttgccatgttggccaggctggtctcgaactcctgacctcaggtgatccacctgcctcagcctcccaaagtgctagaattacagacgtgagtcaccatgcctggccaaaactgaatttttaataagtatctctctcttccaagccttttttttttttttttttgagacagagtctcgctctgtcgcccaggttggagtgcagtggcacaatttctcggctcactgcaacctccacctccgggttcaagcgattctcctgcctcagcctctcaagtaggtgggattactatgcaccaccaggcctggctaatttttgtatttttagtagagacggagtttcgccatgttggccaggctggtcttgaactcctggcctcaagtgatccgcccgtctcagcctcccaaagtgctgggattataggtgtgagccactgcgcccggccttccaagcaattctgatacagatgggccttggatcatgttttgagaaaaaggacacagctatgttccctaagcactgtttagagtaaaatgaaaaaaagttttttcaaagacctccaagctgaacagtagtcacactgagcaggtcctaaacataagtccgctcacccacaagaaccacaaaaaatacaaactgtattcactttgttggttggaccattattttcttcaagccttcagagacaattatcctaactaccattaaggatttcacctgtcacccacagtcttgttatactgagacattttcacacctggatatgatacaaggggcttaatggaatttttatggctaaaaattaaagttcatttgactcaacagaatagtcaaataaaacaaaggagaaaacccaaaggaacaggttgaaagtagaggcttttgacttcctgatgagccaattttgcccagaaattcaaaccatgggatgctatatagctcatatgtcttgagagtgcccaaatgtcaacttatcgccagagtatcagccagtgcaggcttacagtaacatttggaagcacaaatgtgctgtataaaatggcctctcctgggagatagaggctgtcgccatggcagagatcattccatcttggggccagaaggaccaggcagtccctttaatctttaacaagccactttcacatttagatacaggaactggcactgcatgaggctcaacctgcttcacagcactttgctgcaaaacaaccccccagttgtgtgagggcatgctaacccagtctgtccccactggtgcagttaccagaatctattctataatgcaattgtgagtactttattatccactatggtgtaatacttcatagctcagaaaaggtatccaatatcaagaggctagcaactgcctacctcaggcacaatgaaatactaggttcctgtatgtcagtaattgaaaaagtagcaagcatgcaggaaaagaaagaatccagaggggtcaggacccagcctgaggacccgatggaggaggaggaggagaaaggaagtcagcaagaagtcagcaacatgaccaaactgctatcttgggcagctcatttcagaaacccagcaacagaaaccttggaaccatttgatgggtataattttctatataaggctatttcttagttttctgttttttttccctgagcagctaatacagtagaagggcagggaaaagacccctgtcatcaaactccatcacctaaattctaatagcttcataatgaagtgacttagcaggctcatgtcctattactaccttgccgcagtaaccatactctcagaaaaaagattctgtaattcaactctgaagattgcctgaattcatcattcttcttttctgtatacctctgaattcgtctcttctcctaatacacacactcacatgctctgtctccctgacacacatgccctgcctccaataagtcaaacttcctaaacgtctaccctggtttccactaataatgccccaagattaacttacctttgttcatgtccccaagtctagggggcctttgtcaacacgtgtttcatcttgaagggtgatttctagccaagtagataagattacctgttcacctacagttaatcttcaacctggtttctgcaggctatagaaataaaaggatacgactgcacagcttgaatgtcccatcaaggtaatcaaagtaatggaagagggagagaaggcagaaggagagatttcaaaataaagactgaactgtgtacttcagtagtacttaggaaaacactccatctgactaagcagctgatgagtagacaaatacccaaaggactgtgcattctctgaagattattgtgctcacagttctcacttcccccaaagttctgcaagagatcacatcataaaatcagccttgcattatttataataaagtggagagatgcatcctaacatccagtattctactgatttactcacaaataaagctaaaaccttatttcaactgaaacccatgtaacaaggaagaaaacgtattttctttaggtctttcaaaggtacctctctcatcccttttataacagaacagacaagggttggagaaaggaacccaaagctccatcccaggtcctaaatgctttaaaaaattcacattaaaaaatgctccataatacattacccatttgaaaaaaagcactgtgaacagcaggggggaatatatatttaattatatatgatagatacacacatacatatatatacatacacaccgagagagggagagcacgcgcacgtgcaaaagagcgagcgagcacgcacacatatactaaaaccatttaatagcagttattcctagtagggatgggggtctaacttctactttatgctattttagctgggttttgttttgtttttctgagacagttctcactctgtcaccgaggctggagtgcggtggtgtgatcacagctcactgcagccttgaccaccctggctcaagcaatctcccacctcagcctcacgagtagctgagatcactggtgcatgccaccatgcctggctaattcttttattatttgtagagatggggtctcaatatggttcccagactgatctcaaacacctaggctcaagcaatccgcctgcctcaacctcccaaagtgctgagattataggtgtgagcagtttaagttaatcgtattagaaataaagtacctaagaccatttgataacataaaccaaaacaatttgaaaaagtttttagggcctttggaagccaaattttgagtacatttaaagctacagtcatggaggcaaaagtataaaaaattaacaagaaattcacagttttgaaattgtattatttgtctatgggcagtactgtactgggagtgctgtgctatctattgctgggtaaaaagagtttgtctagggtcttgctgtcaaggaaaccatggcaggggtgctaaaaagccagtcagcagaccactgtgacactgtatggaggcagattcattcagagagctaaaaatacaactcaaaaatcttctatctttgtcagtcgaatcagttttactaagtaatctgatgaacttaaaaaccagatataacacctattagaatagctaaaatttaaaatggtggccaggcacggtggcccatgcctgtatttgcagcactttgggaggccacggcaggtaaattgcttgaggccaggagttcgagaccagcctggccaacagggcgaaacccagtctctactaaaaatacaaaaaattagccaggcatggtggcacatgcctgtagtcccagctacttgagagggtgaggcaggagaattgcttgaacctgggaggcagaggctgcagtgagccaagattatgccactgcactccagcctaggctacagagcaagactccaactcaaaaaaaaaaaaaaaacaaaaatttaaaaatgatgacaatatcaaatgctggtgaggatgcagagaaactggatctcatacactgctggtgagactgtaaaatggtacagcaactctggaaaagaatttagcaattttggcccggtgcggtggctcacccctgtcatgccagcactttgggaggacatcgtgggcagatcacttgaggtcaggagttcaagaccagcctggccaacatggtgaaaccctgtctctactaaaaatacaaaatttgtctggtagtggtggtgcacacctgtagtcccagctacttgggaggctgaggcaggagacttgcttgaacccaggaggcagaggttgcagtgagctgagatcgcaccattgcactccagcctgggtgatagagtgagtgagacactgtccaaaaaaaaaaaaagtttagcaatttctttggaaaactgaacatacacttacttaccttaagaaccagcaatttcattcctggatgcttaacccaaagaaactaaaacttgtgtccatacaatcacctgtacacaaatgttcattatggcttcatctgtaatagccccaaactggtaacaactaaaatgcccttccggtgaatagttaaacagcctgtggtatatacacaccatggaatactactcagagataaaaggaacaaactattgctgccacacaataacttggatggatggtgtgacactaagtgaaaaatgccgggttcaagaccagcctgggaaacacagtgagacctatctctacaaaaaatacattcgaggctgggtgtagtggctcacacctgtaataccagcattttgggaggctgaggcggacaaatcgcttgagctcaggagttcaagaccagcctgggcaacatggtgaaaccctgtctataaaaaaaatacaaaaattagctgggtgtggtggtgcacacctgtagtctcagttactcaggaggctgaagtgggaggatggcttgagctagagaggcagaggttgcagtaagctgagattgcgccactgcactccagcctgggcaacagagccagacactgtctcaaaaaaaaaaaaaaaaagttccaattgttctatgcatataaaagtaaaaaacaaaaaacccagtcttaaaaggtcacatattgggtcacatactgttatgattccatttccataatatttctgaaatgacaaaattatagagacaccgaacagattactggtttccagagattaggacagtagggaaaacggatatgcatgataataaaggagtagcacaagggggatctttgtggtggtagaacagttacacaaatccatacatgtgataaaacagcagaaaactacacacacacacacacacatgcacacacacacagagcaccatgtcagtttcctggtgttgatattgtactatggttaaatgagacataaccaatgggagaaaaacgggtgacgggtacatgggaactgtgtagtgtttttgcaacttcctgtgaatctataattacctaaaaataaagtataaaaaaaaaaaagtggtcgggcgtggtggctcacgcctgtaatcccagcactttgggaggccgaggcaggtggatcacctgaggtggagagttcgagaccagcctgaccaacatggagaaactccgtctctactcaaaatacaaaattagccaggcatggtagcgtgcatctgtaatctcagctactcaagaggctgaggcaggagaatcacttgaacccaggaggcagaggttgcagtgagctgagattgtgccatttcactccagcttgggcaacaagagtgaaactccgtctcaaaaaaaaaaaacatgaaattattcagtcaactgtccagccactacggggagctaaaaaaggcaaaatgtttataaagtatagcatgtttcatactattttgcagtctctactatgcaggagagatgattatttaagcatagattggttgttggcccaactatctgaaatacattcaggcactacctgtgccctatccatcacaatatttttatcgagcctcaccaaagccatgagtaatgggccagaaggctgcagaagtaactagtccagaatgaatgaactctcactgcaattttagctcagcagacagtgcctgctatcagaaacatccaaaaaccacagcaattagacaaataagttgtgaaagatgtggtttccaggtaagatgtgacaggcttcttaccgcaaatagtttttcttataaaagaagaaagactggtgggagagatggtggaaaaaatgaaaacaatgtttcttctatgattctctggcccatcctcacaggacttcatatgtagtgaaggcagaatatttgcctcaagcccagatgaccaacttttactttctacactgactcaggcttcttactgaaaatggtatatcaccatttactccactaacatcacttacaagatgaggccctatggggcactaacatctatgtatcttatgtagaattcaattaattgggaaggcctattgacaaacaggaagaccccacacacagacacacacgcacacacacacacacacacacaaaacaaaaaataaccaccagtgaactcttctctaacctaatgctttatttatttagccaaatgtgcttttaagggtgactggcttacacatcaaaaacgtttacaattttagaataaactataaaacatccttcagcactaacaaagctaaaactagtaaaataagtaacaagtattgctaacatcatttttaaatcacattccacacaagtaggcccatgtagttttatgaataaaactattcttttttattttaagaattaaaaagtgatgttagtggaataaatggtgaaacaccatttttaggaagaagcctgagtcagtgtagaaagtaaaagttggtcatctgggcttgaggtaaatattctgccttcactacatatgaagtcctgtgaggatgggcccagacaatcataaaagacacattgttttcattttttccaccatctctcccaccagtctttctccttttgtaagaaaaactatttgcggtaagaagcctgtcacatatcttacctggaaaccacatctttcacaatttatttgtctaattgctgtggtttttggatgtttctgatagcaggcactgcttgctgagctaaaactgcggtgagagttcattcattctggactggttacttctgcagccgacatatttgtaaagacttattcaaaaggtaatcatcctgacggagtgtgaggcagctgtcacccagtagttgacagctcaaccttgacagctggaatacttgggttccaacactgtgaggctttgggccccctctttaatttctctgtgcggcattttcacatttgtggaacacagataacacctacacacctcataggattgttaggaggattaaacttgttaatacagcaaagtccctggcacctggagagcacataataactgttggtaattttcctacaggtaaaatatggcacaaagagaagtatcacatagcaaaagaagtgctagtcttttgatcagtcttacacaaattctcccatacttttagacaagaataagccttcccctaactcccactgaagaatgcatacaatttcattcagaaaaagtatcatctgacacagtggaatgagtgaaataaatcctgctgaacatgcccaatgcttccctagctcctgtggccaacatacaatttcaataggaaaggggattgtttgtaaagacagttttataacatctgtcaccaaacaacagtgaagttcaaagtgaaaattcaagatttcacatagcaggcagagggactttcaaaaacatctgtcctctcactcctgttccccatccctctttcctaatcaaggttataataacgcaagccctctgtaagctggcacacaagctgacaacatgctaccctgctgaacagtcatcaaggaggaaagaaaggcccagggggctgctacaacatttccataaacctcttatccttagctaaaaaggtaaatttgttctagagatgcttaaagaaaaaacacttgactggcataacctagacacatgcaatacctttttcccatttctagttttctcaagtattcagggaatgaccatcgacatttttggaatcagaaacaaattgtttccaaaagtgttaagcagtgcttgtccaaaggcccccatatagctagtaatttagacagctgtgttaggagccacagaagctgcattttctaaccagtattgcttgtgaacaattgaaactttctccagtgcaaagtccagacacaggaagcagtgttctccaaaaacattcaaacagtttcattattgtttaactaccaaaataacagctccaataatctatcaagtttgacatttcatccaactaagcaattaaaccaggatgaaaagcatgcatggagagatttccctgcctgctccaaatcaacactaattttgacattataaccacaaaaactaataatgcatcctcgtagactattcacaaaaggcttctaaaaagcaaacacaaaagcgtctcgaagaaattgcacacccctaaattttattttctgtctcccatctttaagcatcttaactgtgagttaagttacaggccaagaagttagaaactcctttccagtatttagtcaaaaagaggggaatatgcctcccaatacaagcacccaatgcaaattctatcaatttattctttttttttttttttttttttttttgagacggagtcttgctctgtctcccaggctggagggcagtggcatgatcttggctcactgcaatctccacctcccatgttcaagggattctcctgcctcagcctctcgaatagctgggactacaggcgcgtgccaccacacctggctaatttttgtatttttagtagagatggagtttcaccatattggccaggctggtctcgaattcctgacctcaagtgatccgcccgcctcaggcctccaaaagtgttgagattacaggcatgagccaccatgcccggcctcaatttactcttaaatatattaaaggttggctactgtgggcacattgcctatagggtagccctgctctgcaaggagcagtaattttaaaaataatagtaaaaacgccgggcgtggtgattcatgcctataattgtagcactttgggaagccaaggtgggcagatcacctgaggtcgggagttcaagaccagcctgaccaacatggagaaaccccatctactaaaaatacaaaattagccgggtgtggtgatgcatgcctataatcccagctacttgggaggctgaggcaggagaattgcttgaacccgggaggcggaggttgcggtgagccaagatcgcacgattgcactccagcctgggcaacaagaacaaaactccgtctcaaataataataataataataataataataataataataataatagtaacagaagccagatgatgaagggaacatcatcgtttggaaagcatcacaataagacgtgacaggacgtaccaccttcagaagtcgacctgtggcaaatgtggctatgctgccaagcgcaagaggaagtataactggagtgccaaggctaaaagacaaactaccactggaactggtcaaatgaggcacttaaaaattgtatacagcaaattcgggcatggattctgtgaaagaacaccacctaaacccaagagggcagctgctgcagcatccagttcatcttaagaatttcaacaattagtaacacaataaatgttctggtttttaaaaataaaaataaaatatattaaaataaattatatatatattaaatatatataaattatttataataattaaataaattaactatatagttccttaactagtccctaagtattatcaactttggttctgacctaggaaaccaccaagtcatgaaacttctctccccaggtaggaatgggagctctcagatggtagcttcagttataggtggcatgaggaagaaaatgatcaaggacctctgatatcaagttcttaagatgtcctaagaaccacttagaacaatgctattcaaagtgtgtgtgtcagactgctggaggcccattcacgtcaagataaaacacagaaaatcacagtaagcatttagaaacttttctagtgcttgacattgctgtgacatccaagtgcatgatttttctggtgattcccttttcttgtactttacacaattattggctggcaacagattaggggtgaagggaaacccttacaaagctggtccttcaccacagatagtttaagaagcacaaacttttcacactatgaagtgccagttcagtcattattgttctgaaggaatcaaagtacctttgccctcattatcttatagcttctgatttaaaggcaatcagataaaccagcaaggaggcaccctggcataatccaagcttgatcaacccatggcctccgggcccaacacaaattcataaactttcatcagctatcattagtgttagtgtattttatgtgtggcccaagacaattcttcttcttccaatgtggcccagggaggccaaaagatggcacaccccagactataatctaatggaaagagcacaaatccacagtagtcagccaacctagcttctggtctgcaagagtcaaataactagctggatatcctagttaagtctgagcctcttgacttttctgtgctttaaattcctcctctgcaaaataatagcatttctcaatctttttttttatgtgtggttctttctcacataaattctttctccaagtggggtctacagataaactacatcagaatcccacatctctatcccaaacactttgattctgtagggctgggctaggaaccaggaatctttattttttacaagcacctaggagatttttgatcatagtaaaatttaagatctattgcagtaaacatataaccttactaaagacttcaggaataaaaaaaaaggtcacgatttgtatgtaatctccaataaagaagttatttgatttttattattttttttctggagacagggtctcactctgttgtccacactagagtacagttgtgcaaccatagttcattataacctcaaactcctggactcaagcaatcctcccaactcagactcctgagtagctgagactgcaggtgcacaacaccacatctagctaattttttgtattttttggagacaaggttttgctatgttgcccaggctggtcttgatctcctgggctccagtgatctgcctgccttggcctcccaaagtgccagaattacaggcatgagccaccaggcccggcccagaaaatacattctaatatgctttcataatatgtgtaatacataacagcaaatttccatttttccccatcttaaaaagggataggctgggtgcagaggctcacatctgcaatcccagcacttatcccaacactttgggaggccgaggcagacagatcgctttaggtcaggagttcgacaccagcctggccaacatgatgaaaccccgtctctacaaaaaatacaaaaattagctggatgtggtggcacacgcctgtggtcccagctactcaggaggctaagatgggagaatcacgtgaacccaggaggcagaggttgcagtgagccaagatggcaccactgaactccagcctgggtgacagagtgagacactgtttcaaaaaaaaaaaaaaaaagtgatgtttggttgggaagaccaacggtatatcaaaacacacaaacatttaactagtggcatcaaaaactgctttcctgacacgatattcagaactcgaatatggtatatcgatccctcccaaataaaactagaggcttatttttatgtttgtgttcctgggattacaggcacgcaccaccatgcctggcaaatttttgtatttttagtagagacgagggtttcaccctgttggccaggctggtcttgaactcctgaacccaagtgatccacccacctcagcctcccaaagtgctgggattacaggcgtgagccaccgcccaacctgtttgtgttgtttctaaaacaacaacataaggagaaagatttcagtctgtttttttgctagcatttccacaaataacaacagagctatagatagcctgtatctcaaataaaaacctaattagatagtaattgtcaacgtattttcctttttaatactgcttttgggtagtgcaagagacatgttgatgtgctgtggtgaggattttatcaagtaaatgcaatttaagaatctgatgaagatcatctagaggtgaagctgcagaactactatcattttaatgtcccccattaattggtgggctcacagtcactattcctcaagcttctggtctctaactgtgtcaacatttcagagttgggaaacactgaactagatcaatgggagtggtggggatgattcagaatcatctgaagtgctggattcaaccatatggccaagggtacaacaggaaggtggaatgccctttgacaagctgagaatattctgacatccctcttcccaccctctcagtaaacaatggctaaggtatactttagctctgacacagaaggattacacaaactcttccatcagtatatgataagtagacaaacataagagaatctggaagattaagaattctccactgtggactgggaaagtcctcatctcataaattattccttcccacccctgcttgcacataattttagcccctaactattcctttccaccccttgacaaaaatccagattcctcaaactagctgaatttcagtggacctactcctgctaaggccctagaaaacactccttcctctctctccaaattagaacattcctttgcccagcattttagaataaagcatatgctctggctgatcttccacaccatgtaaaataataattagtatagttaagatggtacaatccaacccaactgcaaatggttatgcatctactgacgcaagacctagaagagggttggaagttgatagaggatgaagcttggttatttctcaggcacatattttaatcattatgaaggtaaaaaagcatgggaggattagcagaaaatgcagagggtagggcacatagttttttgtatattttaggataaaatacgttgattcaattgccactaagactatatacatgtgatcagtaccaagactggaaagattttccaaagcaaatgaagagtaaaacaagaagagggtgaggtgggagaggaggatgcacgatttacttaagaaaagctttttttcctttcaaatcttttaacataatccaccagcagttgcaaataaacaatggtgttgatcactaataagttgcatttaaccactcagaagccagcagagcctccacttggcctaacttcctgtaagtttcaagatgagtaggcagcatttctttaaaaaggaccaagacagttaaaatgtttcagcagatcatactggctgccaagtagttcaaatccaggtggatttcccctactcttagaactagccactggtagaaacaagtgactgtcccagggaacactccacaactcagagataatgaaaacatatttttatatgtaattctagaaaaggcatgtgaacatgaaaacagaaaatgtaggtttaactgtagcattgcagagcggcagctttaaaaagtcagataacattagctcaacaaaatcatacactgaagtgtgctcaaattcaaattcagcacatggcggtagtagcagttgaaaaacgctgctgagagagcaagaaggttttgctgtatctttttagaggagaggacaatgaagaaattaccagaccaaggtcacttttcaacctaaaaaaaaagtgggggttagtagctttaacagagataaaaacctgtgtaggttataactccatgaaatcagtagcctggtgagtgtctctccaagaatcttgcaggaaattaagtgtggattgagtaattaaatgtaaagtctccttgagagtaacttcagttattgaagactatatatttctgtgaaacatatagaaaaattatgaggaggatttactaggtatcacatcacagcctttctcctttcacatcaggttggaaacactatgatctaaaaagaatagaacgatttgggaattgttcattctctagtctttgcaaaaattcacgtgctagtgtaactgtaatatacttaggagtttccaaaaatggcacacatttcctcaagagatgtagaaaaaaataatctctgggtaaaaggccaaacattgtctcttctgaatgcttaaacagccaattatgtgtctaatacattaattatataaagagagagagactattacaggaaagttgaataagacatcttaaaaaaatgtaccctggggcctaagtccattcaaatgacagtaaaatcacccctcaaaaaatcagttttatggaacatctagtattttaattttccagctgccaacagaaatatataaggagcagaaattaaactagttatggcagcagcgcagtgaacaaaacttcaattgtattacacactagttagacatttgccaaacaatacaaaggcccttaagggtggaaacttctttagaatataaatgattcccaatcaatatgaaagaaattagtctgtttaggtaataaacagattcatggtttagatgtaaaaattcaactgacatcataattcaatatagaaaataaatatataagaaattaatctctaaaatggctttaaatcactgtgatttacatatgctgtatcattaataggccctttaagctggtattgtactaatcagcttttttaacatcctgcccacaaaagagcttattcatttagctaggagacaggtgttagcaaccagaaacctcttttagcctcgagttccagggactgggcctgcatctatgatgatgattggcaagtctaaaggaaggacagctttaaaagagggaaaaggaggagacagggaacaagaaacgaagaccaaaagggagaaaagaagataatgaaagaaatggatgtcaggtgctacttaatgaggccaccctcaaaggctcctagcctaatctgggctaccgtccaaatacagatggcagaatttgggtaatgttattcatttattcctgcagatagtaactctgggtacatgccaacactccactcattctaaaaaattgtttaaagtgttgctaattgtcctgtgactcattcttcttacccatattctctggttcttaactttagtcctcactctttcatacattttctaaaagagctgactgaatagatattcctggaaagagatatagagaaagctggatttagaaaagcatcttaagcctacagaataaaaattgtgtgaggaagtgggagaagggacgtttattgagttgcttacaatatacaaaaaacatatttttctctctttcaatcctcccttgcatattttcccccttttaatccacataacaatcctaccaggtattttcatcttgcagatgaaaaaactgaagctcacagaggttaagtaatttgcctaaggtagcacagccaggaagtgggggagtcagaattcaaaaccaggtttgtctatacaaacaaactacgttagggataacgtatctagtgcctgaatctgttttaaatcagatggttctatatttcagcaattattcttcctcccatgaactcatcaaacggctgctgactaaattttattaactatttgttacgcacctattattttcaataaaggcttcagctgtgtagaaataaaacaggcaaactgactttattctaaaatttgacatacagagaattcccaggcatctctgccatccaacactgatgatcataactagattcaactacctattcagacctctagttgtttccacattatcattcatttgtccactcatgagataaacgaagctactttcaccaaaaaccctccctcatgactcctgatagataatacagcagaggaggcctcactgtaaagcaatttacataaaagttataaaagctctttgttatctgtcatgactaggaaatgggctattctagcaaatcaaacatcctggatagcataacgattctattagagggactaccaatttataaggaatttcaatgtgcataatttcactctaaaaattaaaaaaagaaaagcgggtcaggcacggtggctcacacctgtaatcccaacactttgggaggccaaggtaggcagatcacttgaggtcagtagtttgagaccagcatggccaacatggtgaaaccccatccctacaaaaaatacaaaaatcggctggacatggtggcgcatgtctgtagtcccagttacttgggaggctgaggcaggagaactgcttgaacccaggaggcggaggttgcagtgagccaagatcacaccactgcactccagcctaggtgacagagcaagactctgtctcaaaaaaaaaaaaaagaaagaaagaaaagggaagaaaagtgaaccccaattttcaaagttccatggggcctgatgtacaggagataatgccccccccaccctgaaaaagagtatcaatgcaataaaacggtggttcccaaacttgactgcacatccaaagcacttgggaagccaggcacggtggctcaatggctcaagcctgtaatcccagcactttgggaggtcgaggcaggtggatcacctgaggtcaggagtttgagaccatcctggccaacagggtgaaaccctgcctctgctaaaaacacaaaaattagccgggcgcagtggcgcgtgcctgtaatcccagctacttgggagacggaggcaggagaattgcttgaacccaggaggcagaggttgcggtgagccgagatcatgccacgcactctagcctgggtgacagagactccatctcaaaaaaataaataaataaaaaccacttggggagctttttgaaaataaagatgcaagggagattttttaaagctagcttcctgctggacgcagtggctcacacctgtaatcccaacattgggaggccaaggcgggcagatcacctgaggtcaggagtttgagaccagcctggtcaatatagtaaaaccctgtctctactaaaaatacaaaaattagccgggtgtggtgacacacatctgtggtcccagctacttgggtggctgaggcaggcacatcacttgaacctgggaggtggaggttacagtgagccgagatcacctcactgcactccagcctggatgacagagctgagactgtctcaaaaataaataaataggctgggtgtggtggctcacacctataatcccagcactttgggaggctgaggcgggcagatcacatgaggtcaggagttcaagatcagcctggccaatgtagtgaaaacccgtctctactaaaaaaaaaaatgcaaaaattagctgggtgtggtggtgggtgcctgtaatcccagccgctcgggaggctgaggcagaagaattgcttgaacccaggagacagaggttgcagtgaaccgagatccagaggttgcagtgaaccgagatcccgccactgcactccagcctgggtgacagagcaagactccatctcaaaataaaatgaaataaaataaaaataattaataaaaataaaaggtagcgtctacatggtatggcctcatagtagtaataataaattataaaattgaaaaaataaaaggtaattctctggtcatcacttacccactcagtcaaaatctccaggaagtggggctgggaaatctgcatttttaaagaatatctcggtcagtgactcagcagcaaatcaccaggtacctcatctttcaaggagtggctggcgtttggaactccttacaataaaacatactcaaaaggctaaagctgcactgaacccaatgtgacctgtcattgatgattcaggagacttcaggatctcccattaccactaggttatcatttactaccagtcactagtcactgtactaacaaaaccagtaaggtaaagttaataaagactttctattagtagagagcaggaaaaaacagcttttgttttattatcagattcaaaaagctggttttactccagaggaaatgcagttttttgttgttgtttttgagatggagtttcgctcttgttgcccaggctgtagcgcagtggtgcgatctcggctcactgcaacctccgtctcccaggttcaagtgattctcctgcctcagtctctcaagtagctggaattacaggcatgcaccaccatgcccggctaattttgtgttttcagtagaaacagggtttcaccatattggtcaggctggtctctaactcctgatctcaggtaatcacccgcctctgcctcccaaagtgctgggattacaggagtgagccactgcgcccagccaagatgcagattttatgctttaaaaaggaaactgtttaaaaacatgcaggactcttttaaccaactgcttggcttcactgcagaatgttaacaggcccaaatacattaaaaatgtggaatattcaccctgcataagaaaagtaaaggaagaacttcatgacagtcttaacgaagagaaaggataatgggtttaaactaagactggcataacaggattagctatgaccgctgtcctgatggcagctgttaaatcttggaaacagggagggcagaggtctttaaatacatgaggccaattcctacctatctgagatggcttttatgtgagatataataggatatcctactaagagccaaattagttttactattttaaaactgcttaactaatataaagtcacaaaataagaagttaatcagatatttccttacgaaagacccgggagtctgtttctatatgaaaagcttgtctttaggctgggcacagtggctcacacccataatcccagcactttgggaggccgaggccagaggatcgcttgagctcaaggcatttgagatcagcctgggcaacatggcaaaaccctgtctccaccaaaaacacaaaaattagctgggcgtagtgacgcacatctgtggtcccaggtacttgggaggcgaggattgcgtgagcccaggaggcaaggttgcatcgagctgaaatcattccatggcactccagcatggttgacaagagtgagacccccatctcaattaaaaaaaaaaaaaaagactatctttacaattgccaaaatctttcttacacaaacaccaaataaccattaccaataaccagaagtgaaacaaaaataaccagtaatcatcattaaaccagtaaccattaccaaacaacaatgaagcagctcctcacttgagacttcaccaatagtaatttaaactatgcgttctcattaaactctaataccttaattctgttattgtattaacaagttatgagattctaaggtatagaggttaaatctttcctccaaaaacataaacactatgactagtacaagtttggtataaaagcctctatcattaaaaccatggcagtattaaaggttctatgacaagaataaaaaatcaaggtggaattagtccccctaacaacttcttaggtttacagaggtgttctcagaaagtcttaggcatgacgctcatagagatgggtgtgactgtatttaaataacaatgcacatgtaattagaaaagaaattgtgcccttttttgttattgttgctgtttgttttgtcttcttaaatgctggtcactaaaaacgccttttccacaacccttaagaggtgttccggcctggcgcggtggctcacatctgtaatctcagaacttggggaagccaaggcaggaggattgcttgagcccagttcatgacgaacaacatggcaaaacctcatctctacagaaaatacaaaaactagctgggtgtggttgcacatgcctgaggtcccagctactcaggaggctgagaagggagagtcacctaagcctaggaggtcaaggctgcagtgagccatgattacgccactgcacgccagtctgagtgacagagtgagactctgtctccaaaaaaaaaaaaggtgttcctattagatggtaccaagcagagttatgtcaactggcttggtcatgagagaaggtttgaaagaaattgatttttaaggtttctgagaagagctttctttttttgtgcatgttattttggaggctggttaaactggtcgatttaaatatttacaacccttgatcccaatgtaaacaagaaatcacaactgtctacctgatcaatatgaaagtttttaacaggctggtctttgtaattagacgggcattaaaatgagtgcgtcctagattacatgaacattttcttcaatcacaatcaagatattagccctgccacatcaatctgcaattgttatgaaaatatacccaaatattttcaaacttaagaatacctctaaataaactgtaacttctgaattgtactctaaaattcagaattaggaaatatacaataaaagttcggaaacctttgccatcatctacttccttgaatgtgaaagagaatgtaatcagagaaaaggataaagaagttgtcaaacctgaaatcccctgaacagaaaggagctgccacggctaggctgcagccctagaactctgtacacaaattcagcccagtaccttgtcccctgcctactcccattcctagaagaatggtataataaacgggcagcccggcccacatttcagtaaattgaactgtcacggggagaataaggcaccccaaacagttgcagcgacagtggttaacaggaagtctctctgtcctccaaaccaataatcaaagggatacataaggaactcactgctttcttagaaggccacatgcaccccgggatgtttgctcatcacgtcactctggcctttaaccagggagcaaagagacagttgtgggtaaaaccctatttccaagctaacaattatccttccttatggtagactggggggtgcacggtacactcttgattacacaagcagtcttcttcccccctagaacaaatgacagaccaacaaaaaggagaaaatgatatgctgttgtttatctcttctgccagcctgaactcaagctctgagcagacgtgccagcggaggctctggctcccctggttcgccagacttccccatgtctggtcaactgtctcctgggcagccggctgaagagaggccccatttccctctcggtcttgaccgctgccgcacagtggcgacctcacacacatcgcgaacagaggacaactcccaagcgagggaacagtggaccctgcggggagaaccgcattcccaaacttctccatcaaacctccaaactccaaacctccctcctccagccgcctcctctaagacggagatagggacgggctggttcctttaaaggggtaagcaggccgccgcggacctgcctcagtttcttctgacgtacaaagaggtatcttttccccacaagccaactagacctgccggtctgcagggcgcttggggataatcgaggacgcacgtctcctgttactgcccccacaggtgaaacgctttctttgaggggacttttcaaaggacaggtgtgggctgccctgaaggcggggacttccagccagccaagggcttccccccacccctgtagggcagggagagtcccaggccgcgccccacacagaggaagggcccccagaccacagcctgacggcacccgaccgtcccccttcccgtccttccccaggccgggcgcccagcggcccccagcgccgccgccgccgcctcctcacctgctgcggccgccctcccggccggcacctaggagaggaggcgaggggaggggccggatcccggccgcggacgcctcaggcagggaggctgcggactccgccgcggcggcgtctctggggctgaggggcacccgggggcggtcgcgacatcctcacgggcggccccaggaagtcggccccccctcccacccatccccagccggcccggcccggcccggccgctcccgccctccgcgcggccccgcccctgactcggccccgccccctctcgggatcgcgcctccgctcccgccgcgcccgagccaccatagagaagagcgaggcgcccggcggcctcgagcgcggcctccgctcgcgccccctggcggagctgaggctcccgacggcggggccgggctggcctgagccgtggggccgtaggaggcgtcgtttccccaaagtcgtggggtcggccgctgctggttaccttggtcacacaactctgcgggaggcgcccaagggtccaggtccaagtttcagctgggtcaagacccggcttggtgaccttgagcgagtccctcaacacctctgaacgcatgtcataaaactttgaaaggtgcctgactttcatgtctcattgactctctcctcggtgcgatgagcaggcgatggtttcccccgcttcatgattgcagaaacccagccccactaggggttacgagcttattcagcgtcccacaactgggaggtattagaagccgggtctgtgggacctaaaaacccatgcttgtcccactcactctagcactgcccagtctaaaccgctaggactagctacttcccctcaggaaagtcaggaagctgctgaggaaggctgtggtagaatgagaatgactcagcgaggatccatccctgcctttcacccatgcacctttcagcaaggtacctaacctttacgaactctggttttctcatcccagaaacgcaggttggcgtgaggatttagtgagcgcatgcatgtagctgtggttagtaaaccgccaagcagcagggcggcccaggggatggttagccagcgtgggctacgatgcctagtcatgaacataatattaagttctaatccttcttttaaatggtgtctagtgacacaattttcttaggctttaggttctattgagaactcctagtttttctgaacaatttgtattttcaaacaaggaatatcgtaaggaaaataagatcatgagccaggcgtggtggctcatgcctgtaatcccagcactttgggaggctgaggtgggtggatcacctgacgtcaggagttcgagaccagcctggccaacatggtgaaaccccatgtctactaaaaatacaaaaaattagccaggaatggtggcgggtgccggtaatcccagctactcggaagacagaggttgcagtgagccaaggtcgcgccattgcactccagcctgggcaacaagggcgagacgacgcctcagaaataataacaataagatcacgtatacatatcagactctgtcactttacaagtattattttcaatcctcacaacccagcaaactgagtactattattcccatgttatcaatgaggatctacatattaagtaatttacccaaaactacatggttagaaaaaggtggagctggaatgtattgcttttttttctttcaaccagcagtgtcttgaatacacggagctgcaatttatttatttttttgagacagagtctcactgtcacccaggctggaatgcagtggcgtgatctccgctcactgcaacctccgcctcccaggttcaaaggatcttcccaccctatagctgggtctacagtcacccgctaccacgcttggctaatttgtttatttgtttgcctgtttttggtagagacagagtttcaccatgttggccaggctggtctcaaactcctaacctcaagcgatctgccgcctcggcctcccaaagtgctgggattaccaggacgagccactgcgccccaaaaagctggaatttaaaactgattttttcaatcacctggaatgcacggaaagactgacctgctaaaggcctcccacatccgaattaaatgtacccttcattttccttcctggctatttttgtaactttccctgatgcaattctgtctggtttgcttctctctaagtcttcatttccagccctaccctccaaaggcatttatggtctcctcctttccctctaattccttttccctagatatgccaggaccttgtccatcctctcaattctgaaatagattcctagctgtgatgaaggcacagccttttccaccacatcactctttctcttgatagaaatcatagttatagaaagttaataggtccaggccaggcgcggtggctcatgcctgtaatcccagcactttgggagacctgatcacttgaggtcaggagtttgagaccagcctggccaatgtagtgaaaccccatctctaataaaaataacaaaaattagcgaggcgtggtggcgtacgcctataatcccagctactcgggaggctgaggcaggggaatcacttgaactcgggaggtggaggttgcagtgaaccgagatcgtgccactgcactccagcctgggtgacagagcaaggctccatctcaaaacaaaaaacaaacaaacagaaaaaaagttaataggtccagaacaagggtggggtgagacctggggatgtcctttcataaacttagtttacaacctgaaggttcagttctgaaagggggtgcacttaatccactgattggatccaataattgaagtttggattcatgacatcctgtggaaatcatttttttctgggccctctggtccatattacaagcaaatcattggaatgctgctaaataatgtgcatatcactgcagcacagaggcctccgagctgcgtttatccacgctcctcctttctccaccttaggcattaccaccgtcactatttttcatctttatcatgcccttccacagaggcattcaataatgtacccattgtgcaagcaatccgaaatccttttcagcgagcaatagtatttagtagtgataaaacactaatttgtctaccaagtgacatatttataggagctgtttacttggacatatttttattatttctactcatttgctaagtactttccaacgcatatttatgaagcacaggcctttccccaaacagttgtgaaaaaataaatcatattatttcttttattagtagcagcacggcttggaagtcctagtgccctgattttagttatttctggcaagagctggaagaattaatagtgaccgaccacctactatgtgccagactctctgtgaaaggcactttacataaattatctgtttaattcccctgaggcatatattttaccaacaaagaatgtaattcccctgcaacatacactttaccagtaggacagagacattaccttgtccaagtaactcggccagaaagggactagcagggttttgaacttagatctttttcctgattccaaaatcccaaatcaccattccatttcaccagcacccctaccaacctctctggatctaatagcttctgtaaaatataaagtgttttttgttttgttttgtttttttaatgagagaggatgtgtaggttactgagaatggaacagttagagataaacatacacagggtgctaaccctaatttttctatgggaggttactcttcaagggatttactccctaagaaatcaatggaaggatgtttcccaaagagaagggccagtactagtgctggatccattcctggagacagaactggctacactgtttgcaagaaacagtgcaaaatatgggatgcttgtttaaaaattaagaacttcaagatggcaacagcagagcattaaactaagtgcagagccctgctaagcatggggctgtgtgactgcactggtcataccaccatgtagctgggcctgcctggacagaagaaagctgtcatcagtatcccccatgcatcataagcttattcataatatgagattgagtgcctatatcatgcctggaaaactattcagtgttttacataagttacatgatcctaaaacaactctatgaaacagatattatttttcccatttcacggtggatgaaactaaggcttaaagagactgttattcatccattgttatatggcaagtaaatgtcaaagctaggaccaagttagttgagatataaaaaatcctgttccttgactttgtatctttgtcagcacaggcccattgttttcctacaaaactcaaacttaagctgaggctattataccaaaaactatagagaggccaaggaagagcagagattcaagggctactcaaaaagtcaaatgtgcagcagctgaagtgcagccgtacagctccagggcatgaggacctggcagagagaactccatcattcatggcaaatgtcatggccaatacccagactcctccaagactgaagggtaacccagtgaggtctttcataaagagcagctacgtggaacctaaggcatctaactcagtaaaatattgtaaatagtccactaaagttaggaacaagacaaggatgattgttattgttgcttctattctgtgtagtactaaaagtcagtttagccagtgcaataggacaagaaaaaaatgatagaaagcattcaggatcactttggattaataatatacctaactctaatttaaggtctatgcatcacagagccttctccaatgccaaaccccagcacacagaactagacagtttaaaccttacccagtgcttgcttcagcagcacatacactaaaattggaacaatacaaagatgattagcatggcccctgaaataaattaaaatataaataaatcctgcccagacaactgcatggcagaacacagcaaaaacctagtaggatatacatctaaatcccttatctccccctgcttcacatctcagggatgcataggccctgttttgttttgtttttttgagatggagtcttgttccgtcacccagactggagtgcagtagtgtgatcttggctcactgcaacttccaccacccgggttcaagcgattctcctgcctcagccttctgagtagctggaactacaggcacccgccaccacgcccggctaatttttgtatttttagtagaaatggggtttcgccatgttggccaagctggtctcgaacttctgatttcaaatgatccacccacctcagcctcccagagcgctgagatgacaggcgtgagccaccacgctcagccagccctgctgttttttattcagctttatttccccctaaacctccagttctctttaatactaatgatatctgccttctccaagtttttgtcattcttttgtaacttccctgggggaaatcagaaagagctgagaagtagatctctgatcccgctttttatggtgagctaagctgaaaagaggttgggatgtgcagcccctgctgctatcagggcaaagtatgaaaaagaattttgtggaaacatttacatatttacagcagaaggcagcgtgcagatgggaaaaaatgggtttggtatcaggcagacatgtgtctggattcccgtgctgccacttattagctttatgtccttaacctcactgagatcccatttactgtctattaaatggaatcattccctctgccacaaggctgtcctaaggtcataatgagacatgcatcaagggcctaaggatacataatagagccttgattaactcgtctttggtactaccgtaagtactagtgagaggctgcccacccagcatccagttcatccacacactctcctttctagtagaaaggagaactcccatttttctttcagtggctccagcatgtgcttcaggaaagcctgtccccagcctcagctccagggctatttcctagttggtttgagtcaatcacagcagtccctttttcttgccagttactgtattacacatgggtgtatgaagcaattctgcaccaatgagatttgaggtgagtcagctttggttggaagttagttctgagttagtcctttgttaaattaaatttggggtcgggtgtggtgtctcacgcctgtaatccaggcactttgggaggcagaggcaggtgaatcacctgaggtcaggagtttgagaccagtctggccaacatggtgaaaccccatctctactaaaaatacaaaaagagccggggatgggggcgcatgcttgtaatcccagctactcgggaggctgcggcagaattgcttgaacccaggaagcagaggttgcagtgagccaagatcatgccactgcactccagcctaggtgacagagactccgtctcaaacaaacaaacaaaagctaaatttggcctgagggctagtcacagtgggtcatgcctataatcccagttctttgggaggctgaggcaggcagatcatctgaggtcaggagttcgagaccagccatggccaacatgatgaaaccccatctctactaaaaatacaaaaaattagccggacatagtggcaggcgcctgtagtcgtagtcccagctactcaggaggctgaggcaggagaatcacttgaacccgggaggcagaggtgcagtgagctgagatcacgccactgcactccagcctgagcaagagcaagactccatctcaaaaagaaaaaaaaaattgacctgaggaggctttacttgggcccttaacaaactgcagccttagtatgcaaactaactgaaaacctaatttaggagtatacttttgtaacagattgctgaggctcagccaatcacatcatcagcttcagtgggttccaggcagccaactattcaaaccattttcaaataaggcaaaggcagagctgtaaccaattagttgtctttgtatctcatttctgttttctgaccataaatgctttcagactatgttgcagctctggaattctctgaacctgtcctggttctgagggcagcccaattctagaattgcaaataaaagtcaattacaatctgcaaaactatatttgctttaattttgtcttttaacaccttgttttcttaatttttattattttattttatagagatagggtcttgctatgttgcccaggctggtctggaactcctggcctcaggcgatcctcctactttggcttcccaaattactgggattacagtcaggagccacagttcctggcatgttaacaccttgttctttaaaggacacacaggaggcgatccttctcctgcctgtagatattgtcacgtctggattgatgctcaaaatggctgcagccaggctttcataaggggaacaagcttgaagacaaaaccaacataaaagaacagagcagaaggatgcaaaggctctacgccatttgacaatgagccactaaattaacaaacctcagacttcctgttatcagagataataagtgtccctgccaggcatggtggctcatgactgtaatccctagcactttgggaggtcaaggcgggtagatcacctgagcccaggagttcaagaccagcctgggcaacgtacagagaccccgtctctacaaaaaatacaaaacttagatgggtgtggtggcacacacctgtagtcccagctacttgggagactgaagtgggaggatcacttgagcttgggaggtagagggtacagtgagccgtgattgtgccactgcactccagagcaagactctgtcttgaaacataaaagaaataaatataaataagtgtccctagtatttacacttctttaagcctaggttttgttacttgcagccttaatgatacatggacctttgcctgagtccttgggaattcaaatgcctgatttttaattaaggccatcaagtgctagcacatagtaggatctcaacattaatttcatctgatgtcagacgaagggcatacaatagtcccctgtaaaaagatatgtaagaagacactctggggactcaatgatgtgggtgtgaacatatatatatattttttagatggagtctcactctgttgcccaggctagagtacagtggcacaatctcggctcactgcaacctccatctcccaggttcaagcgattctcatgcctcagcctcccaagtagctgggattacagatgcgagccatcacacccagctaatttttgtatttttagtagagacagggtttcactatataggccaggctggtcttgaactcctgaccttgtgatccgcccactttggcctcccaaagtgctgggattacaggcgtgagccactgcgcctggctcatatgtgtatatatatgtgtgtatatatatgtgtgtatatatatatatgtgtgtatatatatgtatatatatgtgtgtatatgtgtgtgtgtgtgtgtgtatatatatatatatatgtatatgtatatgtatatttttttcctaagaactagagagtgccctcaggtctcaaaccacccccgcaggggaaattgaaagttgacgctttatggaaggaacccctgagatagagccagtcctttgcttttttaaaatatatttttaaaacatcattcatctatttaatcattactgagcttccataatgtataaagagaaaaagtgacaaaaagtgggagcctgtaggcagacacgtgaacagaaagtacaagtgaataactaatacagggaagttactgtaagcatctatctagatcacagctgaggcataaaaaaggatgtcagggtgggtgtgcaccagacacagtgggagctgggcagagacagacacataagcaaagggagcaaaaggcacttggacaggagagccagcctagcccaagtcctaccaggggactgcacagtgtggtgtggccggaacagagtgcagtggcagcaggcaggcaagacaaagtcctggtctaggaggagccaaaggatgaagctggctgtgaggggcacagcctgcaggaatgtcacgtggtggtctcaagtagcagtgaatgcaacaccttcccatggccacagaaactccttgggtgacagctgtggtgccttcagctggagttacagccctagcaggaatagaactgtatggactgaaaattaaataaaatgtggggattttttttttctttttgaaacagagtctctgttgcccaggctggagtgcagtggcatgatcgcaggtcattgcaacctctgcctcctgggctcaagtgatcctccccactcagcctctcgaggagctgggattacagacatgcgccacgacgcctggctaatttttgcattttttttttttttttgagacggagtctcactctgtcgctcaggctggagtgcagtggcgccatctcagctccctgcaacctccgcctcccaggttcaagcgattctgcctcagcctcctgagtagctgggattacaggaaatgggccaccatgcctggctaatttttgtatttttagtacagacggggtttcaccatgttggtcaggctggtctggaactcctgaccttaggtgatccacccacctcagcctcccaaagtgctgggattacaggcgtgagccaccacacccagccaatgtgggaattaaaaaaaaaagagtcctaggaatcaagttgtgggttccagatcccacctccattctgccactaggactgtcagtcatcctttttgagcctcaggtaccttctctgttaagtaacaggatgggccagatgattttttttttccttgagacagggtcttgctctgttacccaggctggggtgtagtggtgcgatcagggctcactgcagccacaacctccaaggttcaagcgattctcctgcctcaggctcccaagtagcagggaccacaggtgcacatcacaatgcctagctaatttaaaaaatttttttgtagaaacgatgtctcatcatgttgcccaggctgattttaaactgttaaactcctgggctcaagtgatcctcccgcctcaggctcccaaagtgctaccattataggtgtgagccactgtgcctggccccagatgatctcaaactgcagtcctagggtcctcagttaggtattaagtacctgaactcactacataatgggaacagggcagagacggcaaccagactccaccttgaataccaactccaactgactggtagtggccccctggagtgctatattgagaaaaacttctaaaaacactttgacttccacaaaaaagagtgcttgtgcccgattggtcatgtctgctgtgggctgaagatgcccaaatagtaccttgagtggcaagaatttgcaatttccagcttcatgtattgcatcttactgtggttgcaggaatgtgccaatcacccatggtataaagatactgaagattaatttctcctgaggtcttctgtgaaagcaagcgctaggattcccccaggcttaggcttaccaaccctgtcctgaatccaacaccctggtgccagtttgccactccttcccaatcctccatgattctatccctgttgcattcatcacctctaaatgtcattactttctgagtgtaactcggaccctcctttcctgcagccaagacataactgattaattacacaacaggctctctaaccaagaaagatgaccttcctttaaaagatgtggccagtaaccaatcctgatcatttctgtacttttccttttattttccattccctggtgtcttcgtcccctcccagccagggtcatggctctcagacggatggccacagtgctggtgaaagacagagggattatttcatacactagggcactagctgtggtacagctggcaggaagagaggtgtaattatattgcatcttggagccaccagcaatgaatttctgcataaaggactagatttgccatgtattatttacgtcagcatcaattttcccagctggctctatttactgtgcaaattctcctctgtctgtttatgggcaaggccatggttcagcacctctggttatgctgtactgtggaggggccccacagggcaccatgcatattaaatgagtggctggattcaccaggagcaggtcataccctccctttctgttaaattatatccctggaactgcagcgagcccacacgttctcacctagtcatggtgatgcaggcaggtctgaaaccaaatcagcaagaggaaaggaggaataaactgttctttgggcctcactgggggaaactgaaaaacagccttctaaggggaaatcaggtggctctagggctcggggaattgcctttttatatttttaagagcaaaacagagatgaagaagagtatttcatttataagcttatttccacccagtaactcagagacagagctaaggaagagtgggcccccatctaacaaatggaaaggcagagacaaaagaaaaaaaaggcagcagcagcaaaggcaagttagaggctttcccggcttggccactgcgctaggagggagcacaggacacaatggtgatgcacaggattatccatccagtcgccagcatgcctcatcagagatgctcccagccagggtgaacttggtttccaccagaaacatacacgttagaaataagggaaggaaacgtggcaccagtatgaatttctgggtcctcgcaatgcagcatcctctttcgcctgtggtttatatgcttacagagagtgaggccaaggaacccaagatgtctcttctggccagcctgagaacgtctgtagtcaccagtgccaggtggcagtaaacagcaggcgttactgggaagaaaagttgggaggggtccccaatgcttccctgtttcccaaacaacagcacaggtcatgtctgatcaccctgtaatgtggcactctgctctgaggtcccccaggtcccaatgtctaccatctcctggaaacctgttggctggaagaagaagtaaggagtcagtggagttaagcaacccaagtgggtagcttctttagttgcaaggtttcagcctctaaagagttcttctcgaagacatctgtgggtatggaaaccaccctccagggcccaagattactggcatcttcctggggctggctcacctgtcgggaagatttggccagacacgccatgcgccggccgcctgatgctcctgctccctcgatggtgtccaggagaatccgagtgctgggcacaaagctccaggagcgtccgagggcaggtttgagcctcccgctgtccctgtctcgagttatgtggttggtcacctgcagcagaaacagacttacagatccataatgctagtatagaggacatcgattactaccgcttcattttacggagaggaaaacagaggcctagcacagagaaataacttccccaaggttacaaaacctaatggcaggtctggaactagaacctgggcctcctgacttgtgccccgctctttccactaaatctcgatgcctcaggtttgacccgaaccagaaggcgatggggcacatgtcaccatgctttccaggctggtctcaaactcttgagctcatgcagtccgccagcctcagcctcccaaagtgctgggattacaagtgtgggccaccacgcccagacactcagcctttaaaaggaaggaaagtctgacacatgctacaaggtggatgaaccttctggacattatgctaagtgaaatactccagtcacaaaaagtaaataccatatgattccatgtatatgaggttcctagagtagtcaaaaagcatagatacagaaagtagaatggtggttgtcaggggctggggaaggggaaaatgagttatttttaatgggtacagagtttcagttttacaaggtgaagagttatagagatggatggtggtgatggttgtacagcgttatgaatgtatttaacaccaccgaactgtataccttaaagtggttaagatagtaaattttatgttacatgtattttaccacaataaaagaaactggaaaaaatatatagctgctaaaaattacatttctaaaaaatctattttaaaacataggaaatggactcagatggtattttttatgttgttgttttggtttgtttgtttttgagatgaggttttgctctgttgcccaggctggagtgcagtggcatgatcacagctcactgcagcctcgatctcccaggctcaagcaattctcctgccaccaaggccacctagtttttgtattttttgtagaggtggggttttgccatgttgcccaggctagtctcgaactcctgggctcaagtgatccaccagccttggcttctcaaagtgctgggattacacgcataaaccagcgcacctggcctatttttttttattttttcatgaggttagtttagttagaaagctggttaagtgtgggctcacacctgtaataccaacactttgggaggctgaggcgggtggattgcttgagcctggaaggtcgagctgcagtgagctgtgattgtgcccctgcactccagcctgggaaacagagcgaaaccctatctcaaaagaaaaaaaaaagaaagaaagaaagttggctaaaagtataagtaaatatgcagaaaaagtattgtatggagatatgtaaaaatattaatatggtttctgtggatgtggagattgatgacaaatttgaatcatatttattttctatcctttctatgagaagcatgcagactttaaaaaaactacctcataagcagaaaaagttacttcaatagcaaaaagatccatttatatgaagctctggaaaaggccaaactattgggatggaaaacagatcagtggttgcctgggcctgggggaccttttggtggggtcacaagactggatacaactatatccattagtcaaacttcaaacaaggagaaagttactctatgtaaattatacctcaataaacctgactaaaaagaaaaaatgtagaaacaaaacaaaacaacaaaaaaacaacaagacgattcctgattcccttagctatttatggtgcaaagctgtagctgacccagggaagctgggatatgtccctttcctaaagggccactttggggttcagaagctgacatttaagggaaataaagagctcgcaataactagaaatcaagttcattggccaagcctgcttcctcaccaccactgccatgccaaggtcccgggccagggtcttcagctctcgggccagctgcatcatcaaggccaagcctgcaggaggaggagaagcagagagggagggcagtggggaaccagggatggggctggccagagaccagactccagagctgggaggcgaggtcacattccactggccccaggctctgccacatcactcaccttccctctgctgacctcccagaagtggggaaaccaccgcagtgaccgagtccacaaccaccaccttcacagttcctgaagaaccagtcacctgaaggaatgtgggggaagcactcatgaacctgtcagcctctaggacacattacaggacaagcttgcttttctatctaaaactagtaagaaatagcccccccatcccaaatacagcaagctgcacgggcatcacagaatgtcatcagcagcaatgtctccctcgtcccattggcatgtgtaacagacttcaatgaagacttgggtagaaagaaagggtttaaatcacaggacatcaaaactacactaaagtggctgggcgcagtggctcacgcctgtaatcccagcactttgggaggccaaggcggtggatcacttgaggtcaggagttcgagaccagcctggccaacatggtgaaaccccgtctccactaaacatacaaaaattagctgggcgtggtggtgcacacctgtaatcccagctactcaggaggctgaggcaggagaatcgcttgaaactgggaggcgggggttgcagtgaactgagatcacaccgctgcattccagcctgggcgacagagcaagactctgtctcaaaaaaaataaaataaaataactaaaaactacattaaagtcatcaaatttcagaaagctccgcagagagtcctgaggcctctggtcatggatctctcagcagccatctctctcctgtgtccagcctcccaccatggtggtaaggcccttcttttccttttctgactccctcctttctttcccttgtcctgctaactaccaccctcaaattcctaacttcctttgctgaagagtttagccttctctttacttcactgtctccttctagatcatgcctctaggcctcatcttccgtatctaaaatgcctccaaataaattccctaagtcttgctctgtcacccaggctggagtgcagtggcatgatctcagctaactgcaacctctgcctcctcggttcaaacgattctcatgcctcagcttcctaagtagctgtgactatgggtgcacacattgggtgcacactacgggtgctaatttttgtatttttagcagagacggggttttaccgtgttggccaggctggtctcgaaatccggcctcaagtgatctggccactttggcctcccaaaatgccaggattacaggcatgagccaccaagcctagcctgtgccatctttctaaccataattttctgtctttacacaagcaggagaatcctcctggtttccctggacttaaactgtttttgatgcttcttttctcttctcccttacttcttatatcctgattctggttctttttcttttcttctttctttttcttttttttttttttaagacagggtcttgctatgctgcccaggctggtcctgaactcctgggctcaagtgatcctcctgccttggccttccaaagcattgggattttaggcgtgagccaccgctcctagtctcagattcttaacccctagaaactgtgagataagaaatactatgtcttaagccactaaggttttggtaacttattatgcaataatagaagatatatcatctaatggtcctacagtaaaaaatacagtcttctgatctggaattgagaggtttgggctataaggttagttcttgccctaaatatttggtcaactttggtcaactcacttcacttctccggccttcactcttctcatctctaaaagtgaggtaagcactactcagcttcatgtctcaacaagctggtgggtcataaccagctatgacttctgaggtaagtatttgttcaacatttttttttaaagacggggtctagctctgctgaccaggctaaggtacagtggtatgatcatagctcactgcaacctccaactgctaggctcaagcaatcctcccgtctcagcctctggagtcattaggattacaggtgtgggccaccactcccagcttgttcaactattatatgttctaaagtttgtaaaaatcattgactttatatatagtcgtggggatgcccgtgtgaacacgtcatgctttggggtgagaggaaaagtttgagataaactattctatctttaaggtatcctccacatctagtcatttataaatcagtgcaccaaatcctgtctaagcacccaacatgagtagcaaagtgccaacccaaatgccattctaaatccttcccattaacatgactctgaatgtgttcagcgactgggcagaaatctgacttcagggatggtgggcccaggtcttagtccaagatacacacataaccccattttggccaactagatgtaaggggaagagggacgtctattagtgggctctggagaaagattcttcatccctgataaaagggaggaggtacagaaaagaaccatctatcttttactgccttgaatatggatgtggatgtgtgaagacaagatgcttggagctttggcagcctctttgcaaccatgaggggaagaacaagaaaatcagacacacaaatctattgccctgatagcatggacctgccaacctcccaactcatgtgacataattaaatgtcctcaagcttcaagtctctgtcagacaacctctattacttgcagctaaaagtattcctcactcacctagtggggaatgcagacataaatatgacatgatccttccactcagggggctttactgttcagcagggaagatgaacatgtaaacaatgaggtatgtgatttaggtgctcgggaattccatcctgggagtagcaagcatagttggagtcaccagattgcacatctgcatttccaaacagtctgtagtaggacacctgcccacagagatagcacctagaaagctgaattaagcaaggaggggcagaacagcaggctcacctgctgggccacagtgcctcggagctcctgcagcacatccagcatctggaagatgtcaaatgcatgcaccacctggatcctccggagagcttctgcctgaagcggtggaaaagaaaagcaaggactttggataagagggagtaggggggtcaaggtaaggctgagaaggaagaggcacctggatgcaaggactcaggtccagggtggcaaatgagctttgtctaatggtcagttgtcacagtggtggctgcctgggtgctgagctgtaaagtactcagaactcagcaggaaagagggatatgactgattagtgatgtctctcacaggtgagaaatggactggaaacacaaagcttggtgtttgccagccctggtttagggcatgcaaagagttgggagggtttcctggaagaatcagtgtgagtagcatcccaaatgggatgatggcatcaacaggggtggcttaaggaatacgagatgtattaatagaacagcaagtttgaaggcaaggaatgactattcaacccaaattcttacaatgttaagggataatggggttttcctgtgtcagaatctcaatggaacccagcatcctgcccttacctgttcctcctcatcctgggttttagcctgaagcagctggaggaggcgggaagctgtcagccctccattggaatctacatataggacgttttgctgcaggccatgggccacatttgctgccatacagagacatacctgggggtgggggcattggatgaacttgacacttcagagagggtccagatgggagctccccaccaaaccttgcccagattccagcaacacaaatgggctgagtcccgaccccattccttattacccatcttctctctgttgggctctgaacccattagtacgctgaagctcccccagggaccctgggctatgcatctaccaccctcacccctaaatcctcctgactgctggcctcacatgtacctgagttttgccgctacctgggcctcctacaatttcagtcacttctccagtatagagaccagcatcaagcagtttatcaagactgatggcagaagagaagaaaatcaacacaagaggttaggaggaagacaggggaaaaggtaccaagaagaaaagtaagacatttctttcaagcactggttctgtctttgaacatcactggccaggaggcttctcctggtgttttcttctggtaaggagggaatgcccaaatgtgccttctctggtctctcttcatccctccactcttaaagatcagctctccagagaggcctctgccaccccatcagaaggttctcccttcatttttcatctcaggccctgtgggtttcctttttttttttttttttttttttttttgagacggagtctctctttgttgtccaggccggagtgctggagtgcagtggcgtgatctctactcactgcaacctccacctcccaggctcaagtgattttcctgcctcagcctcccgagtagctgggactacaggtgcccgccaccatacccgactagtttttttaattagagacggggtttcaccatgttggccagcctggtctcaaactcctgacctcaagcgatccacccacctcggcctcccagagtgctgcaattataggcgtgagtcaccacgcccagctgtttgtgggtttccttgatagcgtttcccaaaatttgtcgctttttttaaactttgatggtggcacacgcctgtagtcctagctactcaggaggctgaggcaggagaatcgcttgaacccaggaggtggaggttacagtgagccgagatcacgccactgcactccagcctggtgacagagcaagactctgtctcaaaaaaacaaaacaaacaacaacaacaacaacaagaaaaaacaactttgagataattatagattcccaggaagttgcaaaaagtccatgaacccttcacctggtttaccttaataataacaactgtactacaaaatgtattgtactagccaggggcctgtagtctcagttacttgggaggctaaggtgggaggatcacttgagtccaggagttcaagtctagcccaggcaacatagcaagacccttttctctttaaaaaaaaaaaaaaaaaaaaaaaaaaggactatagtatatcacacaagtagcaaactgatgttggtactatccacagagcttattcagatttcaccagtgttcctagcattcaagcacgtgtgttgatgtgtctagtcctatgccattttatcacatatgtagatttacacgactactataatcaagatacagaacatttccatcactataagtcttcctcctgctacccttttatagccacattcctcccattcacccctaatcccgaatccctggcaaccactaatctctattatgttatttcaagaacaaagttatgtacatagaattatacactgtgtaacctttgtgattggctttttttcttttcttttttttttttttttgagacggagtctcgctctgtcgcccaggctggagtgcagtggtgcaatctcagctcattgcaacctccacctcccaggttcaagcagttctcctgtctcagcctcccgagtacctgggattacaggcgcccaccaccacacctggataatttttgtatttttagtagagacggggttttgccattttgggcagactggtctggaactcctgacctcaagtgatccgcccaacacagcctcccaaagtgcggggattacagacatgagccaccgtgcctggccctgcgattggcttttttactcagcatcattcccttgagatccatcccagttattgcatatatggatagttcattcctttttactgctaaaaagtattccatggtatggatgtaccacagtttatttaaccattcatccattgaagggcatttggttgtttccactttggggctactataaataaaactgctataagcattttttacaggtttttgtataaacccaagtttttacaacgttgggataaatgcccaagaatacaattgctgggtggtatggtaaatgcattattaattttataagaaactaccaaactattttccagagtggctatgccattttacatatccgctaacaatgtatatatgagtagtccagtgtctccacatcttcatcagcatttggtattatcattatttttttattttagtctttctgataggtatgaaataatagctcactgtgtttttaatttgcatttccctaatagttaatagtgttgaactttttttttttttgaaacggagtttcactcttgttgcccaggatggagtgcaatggcgtgatctcggctcaccacaacctccacctctcaggttcaagcaattctcctgcctcagcctcccgagtagctaggattacaggcatgcaccaccacgcctggctaattttgtatttttagtagagacgaggtttcttcatgttggtcaggctgatctcaaactcccgacctcaggtgatcaacctgccttggcctcccgaagtgctgggattacaggcgtaagccaccacgcctggctttttttttttttttgagatagggtctcacgtctcactgtgtcacccaggctagaattcagtggcatggtcacagctcactgcaatcttgacctcccaggctgaggtgatcctcccacatcagctcccccaagtagctgggactacaggcatgtgccaccacacccagctaatttttgtatttttttggtagagacagggtttttgccacgttgcccaggccagttttgaactcctgggctcaagcaatctgaccacctcagcctctcaaagtgctgggattacaggtgtgagccagcccttgcccattttctaattgaattgtttgattttttattgttgggttttaagaattctttcttcattctagatacaagtcctttgttgaatacatggcttgtaactatgtttcccattctgtacttctcttttcattctgttttgcacagcaaaagttttaaattttgattaggccccattaatcaaaaattttttcatggatcatacttttggcatcaaatctaagaactctttgcctagattttctcctgttttgttctaaaaattagacaatttggttttacatttaagtctatgatccattttcaatttttgtataaggtataaggtttaggttgattattgtatatttttagcctatgatgtccaatagctccagcgccctttgttcaaaggctgtctttcctccaacacattgtttctgtacccttgtcaaaaatcaattgtgtgtaatcccagcattttgggaggctgaggcgggagcattgcttgagcccaggagtttgaggccagcctgggcaacataatgaaaccctgtctctataaaaaaaatacaaacaggctgggcgcggtggctcacgccagtgatcccagcactttgggaggccgaggcgggcgatcacctgaggtcaggagttcaagaccagcctggccaacatggtgaaaccccatctctattaaaaatacaagattagctgggcatggtggcatgcacctgtaatcccagctacccgtgaggtcgaggcaggtgaatcaaacccgggaggcgggggttgcagtgagccgagatcacgccattgcactccagtctgggcaaaaagagagaaactcaggccaggcgcgttgactcacacctgtaatcccagcactttgggagtccgaggcgggtggatcacctgaggtcaggagttcgagaccagcctgaccaacatggagaaaccccgtctctactaaaaatacaaaaaagttagccaggcctggtggcatgtgcctgtaggagaatcgcttgaacccgggaggcggaggttgcggtgagccgagatcacgccattgcactccaggtcaggcaacaagagcgaaactccatctcaaaaaaaaaaaaaagagagagagagaaactccgtctaaaaaaaaaaaaatacaaatacaaataaccaggcatggtgtcccacacctgtagtcccagctactcgggaggcttggggtggaaggattgcctgagcccagggaggtcaaggctgcagtgagctgtaatagcagcagtaccctccatcctgggtgacagagcaagactctgtctcaaaaaaaaaaaaattagttgtgtatacttgtggaggtctatttctgggttatctattctgttccactgatctgtgtccatctgtcccttggtcaataccacactaggcttaattatgtagctatatagcaagtcttaaccctgggtagactgattcctccagctatcctttttccaaattgttttagctaatctaggtaaaactggtcttcccgtaattattagaataagcttgtctatgtctatagaaaaaaaaaacttgctgggattttaataggaactgcgttaaattacagatcaacttggggacaattgaaatcttcattatgttcagtctcccaatccatgaacaaagtacatgtcatccatttatccgagtcatctttgatctctttcatcaacaatttaaaaattttcagcatacagattctacacatgctttgttagacttatacccaagtatttcatttctctgaaacaactataaatggcattgtgtttttgtttgtttgtttatttgcttgtttttttgagacggagtctcgctctgtcgcccaggctggagtgcagtggcgcaatcttggctcactgcaagctctgcctcccaggttcacgtcattctcgtgcctcagcctccccagcagctgggactacaggcacacactgccacgcccagctaatttttgtattttcagtagagatggggtttctctgtgttagccaggatggtctcgatctcctgaccttgtgatctgcccacctcagcctcccaaagtgctgggattacaggcgtgaaccaccacgcccagccattttgtttgttttgtttttttgagacagtttcactctgtcacccaggttgaagtgcagtggcacaatatccgctcactgtaacctgcatctcccagattcaagtgattctcccgtctcagcctcccaagtggctgggattacaaccacccaccaccacgcccagctaatttttgtatttctagtaaagaccaggtttcatcatattggccaggctggtctcgaactcctgacctcaggtgatccacttgcctcgaccttccaaagtgctgggattacaggcatgagccactgcggccggccaataaatggtagtgttttttattttagttttgacatgttcactgtgagtatagagaaatgcagttgatttgtatgtgttggtcttgtatcctcactagtcctaggagtttgtaattatttgttatttgcttgtttttgtttgtcttgctcatctagctgagagcaccatggggcaaggactgggtccgatccctgtcgcatccccagcactagcacagtgcctgaaacacaggaggcacccaataatcattccagaaaaatgagtaacagaaaggtgctatcacttttatttcgcttctgtatcatcaacactggctgtgaaagacttgggataaacctcatgacatgccaattcctaaaccaggttctctccctcaaccacatgaaacaggtcaccacctaccctccatgccctgccctatctctaggctgaagtttcttctatgccacggcctgtaccaatgcctgatcacatgcgtacctttcctagccctacaatcaccttcctaggttccagtccttgagatggttcttgatgacctcccatgacctctctgtatatgccgaacagcactttagtaagcatcccatccattttttttttctttttgagacggagtctcgctctgtcaccaggctggagtgcagtggtgtgctctcggctcactgcaacctccgcctctcgggttcaaacaattctcctgcctcagcctcccgagtagctgggattataggcacccaccaccacgcctggctaatttttgtatttttagtagagatggggtttcgccatgttggccaggctggtctcaaactcctgacctcaggtgacccactcgccttggcctcccaaagtgctgggattataggcatgagccaccgtgcctggcccccaaccattttaattccagggactccccatgattatacccacaggttcctgccagtcaaaacactctggttaccactctagccctgtggcttcttgagataattgtgctcaccccatctctgtttaataagtatccagcctctaccactcctgattccattcttcccattgagatcagaggaaccccagtgtggtccccagaccaggtgcatcagcaacctttaaggactagctagaaatgcaaattcacagctccgctccccaagacctactgaatcagaaactctgggaatgcagcccacacttgaaacttgagtttcaacaaggcctccaagtgattttgaagcctgctcaagtttcagaaccattagactagagtagttagtctcaatcctgcctgcacattaaaatcaggggagttggctggacgcagtggctctcgcctgtaatcctagcactttgggaggccgaggcgggtggatcacgaggtcaggagatcgagaccatcccggctaacacggtgaaactccgtctctactaaaaatacaaaaaattagctgggcgtggtggcgggcgcctgtagtcccagctacttgggaggctgaagcaggagaatggcatgaacccgggaggtggagcttgcagtgagccgagatcgcgccactgcaccccagcctgggcgacagagcaagattccgtctcaaaaaaataaaattaattaattaaataaaataaaatcaggggagttttttaaaaaatgcctatgtcagcagtacccaaagttgtctgcacattggattcacctgggagcttcaaaaaaatactgatgcctggccaggcatggtggctcatacctgtcatctcaacactttgggagacagaggtaggattgcttgagcccaggaatttgagaccagccttggcaacacagcaagacccctgtctctacaaaaaaaaaaaattttttttaattagccaggcatggtggtgagcacctgtagtcccagctacttgggaggctgaggcagggagactgcctgagtccaggagttcaaggctgcagtgaactatgattgtgcaccactgcactcctgcctgggcaacagagcaagaccctgtctctaaaaaacaaattaaaaaattaaaaaatactgatgcctgtgtcccactcacagtgaatgagattaattggtctgggggagacttggacttcgtaatgtttaaaagagtcctcaggtgactccaatgggcacacaagtttgggaaccactgacctagactaattaaattagaatatatagagttgggaccagagcatgaatatctcaagtttcccagatgattctaacgtgcagctggggttgaagcactggtgttgactctagtcaagaatcaaccacatccttggctgtggagatcagtctgtataaggtattcccaaatccaccttccagccaacttctcacctgagtttccattccgtgcctctccgactgcccagagaaccttcctaccaatatgtccccatcacctttaactccgcatgtcaacagggagagacccctgtcttgccccatgaagcagaagtacacctgggttttaccactgcctagaatacaggtgatttctgggacttatcctctgcctttccctctgaactgccttttagccattctttcagtcatccattcacacaccacttcaatgcctcatatttcctgacagtcttattctaaaatgaggggactgtgggatgaacagacctagctctggcctataaggaataatcaatctccctcatcaacatagcttttcccaaagtacgttacatgctataacaccctgtaaggaatcattgcacctcagcactaaaggttctgaggcggcctacaacagagaaacctgtttaatttggattagtcaggcatttctcaaacttctgactacagaactcccctcctcccaagttttaaagttacaccattaactgtccacagcacacggtaagaaaggctagagactgggcatggtagctcacgcctgtaatcccagcactttggaaggccaaggcgggcggatcacgaggtcagaagatcgagaccatcctggccaacatggcgaaagtccatctctactaaaaatacaaaaaattagctgggcgttgatggcacgcacctgtagtcccagctactcgggaggctgagtcaggagaatcacttgaaccctggaggcggaggttgcagtgagccgagatcacgccactgcactccagcctggcaacagagtgaaactccgtcaaaaaaaagaaagaaagaaggaaagaaggaaaggaaggaaggaaggaaggaaggaaggaaggaaggaaggaagaaagaaaaggaagaaaggaaagaaagaaagaaagaaagaaagaaagaaagaaagaaagaaagaaagaaagaaaggctagaaacctggtgagtcagctttgattcttcacaatacattccaaactccgacaaaaaaaaaaaagaaagaaagaaagaaaggctagaaacctggtgagtcagctttgattcttcacaatacattcctcctggtagtaggtcttgtcacagttcctcttcaacatgtctcccactgttctagactggactcacataccccaggccagcactgccagggccctgcttggcctctgccacccttccaccctgcacacctctaccccactgtctataaccctgctttcacaatggcctcccgcctccagggagacagccgggcagatgagttaagagccgcgttcttagacttaggagtgtgacaagcatgaactcaaataactggtctgccgtttgctaactgcacaatcttgaacaagtcatttaacctgagtcccaatttcttcacctatagaatgatgatttatttttattttattttattttattttatttttttgagatggagtcttgccctgttgcccaggctggagtgcagtggtgcgatctccgctcactgcaagctccgcttcccgggttcatgctattctcctgcctcagccttccgagtagctgggactacaggcgcccgccaccacgcccagctaatattttgtacttttagtagagacggggttttaccgtgttagccaggacagtctcgatttcctgacctcatgatccgcccacctcagcctcccaaagtgctgtgatcacaggcgtgagccactgcgcccggcctagaatgatgatttaaacagtaacatgctcattggtggttgtgacgaataaatgaaataatgtaccgtgaagtgctgaccgcagtgcctcgttcatcgaaagcattcagcgaaagtccatctgttcctccatgcccaagtcctgccttcttcagagcattcctgaccccactccacgatctccctgcggggacctgaggcagctgcagtcctcccaggttcccacttgagtgcgccctccatgtctgttggatttataaactccctaagcccaaggccaatcggcttcctgttcaccactccctccttaccgttgcctccctcggtgcttacagctctcttgtattcacttgattttcccctacacccaactagaggccttaagggcaggggccttgcctcattcgtgtatgtatcatctgcacataccaagcacccagcaggcccttagccagtgcttgatggatcacagactcagacccccaaccagggaaagcaagcaccacactgcatgaaccctgccaagagaatgtgttaaggaaacagaaagggccacaccaatccaaagacctttatggtggcagttattcatcaatttctgaacaaacagaccaggaaaaaggtcaagactcacttggccagcaaacgtctgtcgtctttgcaactcttccccaacccaccaaacaacgtggcgggacataactgctccttttttttgagagagtctcgctctgccaccaaggctggagtgcagtggtgcgatcttggcctactgcaacctccacctcccacattcaagcaattctcctgctgcagcctcccaagtagctgggactacaggcgcccgccaccacgcccgactaatttttgtatgtttagtagagacggggtttcatcattttgggcgggcaagcaggccaggcaggtctcaaactcccggcctccagtgatctgccgcctcagcctcccaaagtgctgggattacaggtatgagcactgcatctggaccgcaactccttctttctctgaactctcctgttctctactgctgcagatgtggtgaataagttctgggccacatactcccgcgcttgagcctcacctttgccacttgctcctcttaggctaaactcaagtagggttaattatctctaactggtagagtcactgaagagattacctagaacatacaggtaatgcctgcacatagtaggcactcagtaaatgttctctcttgccatatccttaagtaaaataagaagtagggccagagaagatggtgaaaataatgagatactgacagcttgtgttataggacaatgcttctcaaccagaggcaattgtgcctcccaggggacatttagccatgtcaggagacatttttgatggttacaactggagcagggctggtgctactggcatctagtgggcagaggccagagatgctgctaaacatcctacactgcacaggacagcctccaccccccaacaaataattacctgtccctaaatatcaatagtgccaaggctgagataccccataaccctgttataggataagaattcagatgtcctgacccctttccttcccatccattattggttaaaaaaaaaacccctcccgtctagactcaagcatcaaaagcagagctgagaggaggccccatcctcctgcctctctccttcttccccaagtacacacacaaacctgccaatgccagtggacaggatggcagtggaggtcttcagttcctcgtagagatcagcgccattcacggggaaagccgagaactgagccagcagcacccgcctcagggcaaccagggcctgccaaagggccccagactgctcagcaacaaattgcccgtagaagctggcatcccagggtgtcattcaccctacttctcaatatctgagaaccctctgctccctttggcttgggatggacttttgttattgttgttgtttcagacagggtctcactctgtcgcccagattggagtgcagtagcacgatctcggctcactgcaacctctgcctcccgggctcaaatgattctccttcctcagcctcccgagtagctgggattgtaggcgtgggccaccacacccagctaatttttgtatttttagtagggacagggtttcaccatgttggcctggatggtctcgaactcctgacttctgactccaagtgacccacccgcctcggcctcccaaagtgctgggattacaggcatgagccaccgcgcccagctggcttgggatggactttttaaaaagacactcaggtttggaatgtggagatcaggagctcaccttgtaagacaagccacatttctgagctacctcttccaggtctgcagaaaccaggtccaccactgaaaacaaaacacgtatagcggattggcagagaggactggggcctcccacacttggtttttcctcatctgtcaaatggggtgtcaattctaccccccggcaggccgtctcaggaggccagtgtgaaataacaaagctgcaggagccggcgcggtgccctgcacacagtaggaatctctaccctgttttagagcttggctccccacgcccacccttcctgagcctctccagaagcgcggccctctaggaatggaggggaagcgccctgcaggtatgccagggcagtgcgccagccctcggggcctgcccaggttgtgcgaggcccgcgcggctccctggcacgcgcacacccggtcacctgtcttgatcctgtggctcctgagaagctggatcatctcctcggtaaggccagggcacagtccgaccctgagcacgcccatgttccccgcaggccggaacagccccagggggactgcacgtcacgtgggcattcgcggggggtcctctccagacgcccctcccctaccccttcctagagaggacacaggcgcgctggctgccggaggagaaaggagagaggaggaggcggcaccaagggtagggctgggggtcatccgcccgcccgggatccgccgggattcccgcgcccagagcccgcccgccgggtcgcgccgcgctgccgcttccgggttccaggctggcgcgcggcgaggacctggcctgcagcgccatctgcgggccgcacggggcagagccgctgcgcccctctccaccgcctgcacaggttcccgagtcccacgaccccctccgcgctcaacacgccacccgcggccacattcggcctctaccttctgccgcaacacacacaccgaccttctaaagagccttctgtgcgccagcttccgttccaaacggaacggatctccgctggagacaaaatgcgacacaagacgacccgcccttacccccagggagcttactgtgagcaagggaaagacagacaatgaaaaggaatcgcagaaatcacatcattacagattatacgacaggtgtcaagaagcagcaaagcatccagagggcacctgcgtctatttttcaaaagtttgttttgttttggttgagacagggtctcgatcggccgcccaggctggagtgccctggtgagatctcagctttgcagcctcgacctcctgggttcaagcgatcctcctgcctcagcctcctgagtagctgggactacagtcacgtgccaccttgcccagctaatttttgtattttttgtagaggtttcgcctctacaaaatggggttacaccatgttgcccacacaggtctcgaactactgggctcaaacaatcctcctgccttggtctcccgaagtgcggggattacaggtgtgagccaccgtgcccggcctctattttttattttattttttattttttttaagggcaagaaaccttggttatatagaacacacacaaaaagatatgatttggtatttttaaatgtcctttgctttgcctcatccataggaagaaataaaactttacatggttatctcatcacaaatctgtgagggaggcgctattttttatccctgtttcaccaatgaagaaactgaggttcagtgaggttaaatcacttgccaaaggtcacccagctaggcggcacagggctggacttcacatccacatctgactctgcaaagccagtgctttctaacagcccccctccccacccctgaagctgtgtacatgttttcctactgtaaggtggtttctctgagagcagagatcatgtgtggcccatctctgtatcccactgcaactgccaccattgtcactccacacaggaaagtacttgggagtgtgggtgtggcacatttagaattctagcagtgaagtctgatcatatgtgagccatgaacccctatgaaccatgtgggctttccctttcactaaccgactgggcacagtggagtctgcagcctatggtttcaggatagagagccttagcttctacggacaaagtttccctccccagcagacactttccaatactgcctatctctcagggccacaccaccatcctctacatcccacgcccatctctcaccatccttattctccttcccagggcagtgcggaaggacacaggtgtcaggcattttgagatcttcagagaagggcagggctgccatcaccatggagtattagagctggaaggggcccaagggctcatgcagtctgttccttggttttacccctctcatgatgctgcttcacagtcacactggcccttggtctggccagccacatagctagcctggcagcagtagcctcaaatcaaggggggaggctggcctgtaattgttacactctgtgatgattatgaagtcagctcattgcacctgcagactgtccaaactaaaggtgggccactgcccccacagtttctctctgcttctggtcagctgggttgtcctgcatggtgacgggtgtcatcccgaacaaatcagatggcatcagaggcactccatcaagtgggagatggggaggaggctgtactgaagaaagaaaacttcaacatgatgaatgcccttgaccaactgccaaaacccttttcaaaccccaagtctatgaaccggaccgtcactaccaaaggactcccactagcctcaaagggcaatttggtcaacttcttggaggatgataccatcaacctactgtaagtcacaaatctggtccctccctccctccctccctccctcccttccttcctcccttccttcctcccttccttccttccttcctttttttttttttttttgacaggatcttgctttgtcacccaggctggagtgcagtggtgcaatctcggctcactgcagccttgaattcttgagctcaagtgatcttcccacctccacctcccaagtagctgggactattgacgcgccaccaccacacctggctaattttcatatatatatatatatatatatatatatatatatatatatatatatatataaatttttttttttggtagaaacggggtttcaccgtgttgcccaggctggtcttgaacttccgggctcaagcgatcctcccgcctcagcctcccacagtgttgggattataggcttgagccaccatgcctatagtttctaagaaaggctggagccgagggctgggcagagagacaaagaatctatacttccctgacttgtcacaacccagttccttgactcccagagaagagcgtgtgggcaggttggatctatttatgtattcctgagccccaaatcacttcttggaggcatatggagctcccactccaggaggccttcttggattagtcagtttgttgacagtgctccttatcctgccttgactggctgtggtcctcaccatcaccaaatccctgacacacccatggctcctcttcctcaaccctctctctttggtaccttcatctacctgactgctccccagtagcctgccttccttcggactgggttttgctgttcctcctcaccaagtctggttttcctctacttcattccacaaaactctttgagcacctgcaaggtgtctgtcccagtgtttaagttctgggaacgcagagctggaaagcacagtccctgcctttaaggagctcccagtctggcatgtggaggtcaggggtgaaaggatggggatcatgcaataaccagaatgatatagcatggtctggtaagtgccaggacaggatgccttgagggaccagaggggcttagtatagcttgagactgggtgcagttgaaggaggcttcttggaggaagtgatatttgagctgagtctccaaggaaggaaaggagttagccagtgaaggggtggtggtacagggtgatgtgggctgagggaattacttgcaggtcacccaccacatgggtgaatgacctgtgcagtcacaaatagccctgcacttacaaggggcctgtgcttagtttaatgcttttctgttactatcttcaaattcagaatttttgaataaggggctcagggtacttcaatttgcactgggctccacagactacatagctggtcttgagtatgtgagagggatgtggtgtccattccccaaagtgcccgtaagcaagcaggtatggctaaagtgatggatgctcgtaggaaacttcatggtatactgggaatcttggactagaagcccaaactcagatccaagttctgccacttagagatttatggtcttagacaacttaattaagatcggaggccagatggggtagcccacgcctgtaatcccagcactttgagaggctgaggcggatgcatcacttgaagtcaggagtttgagaccagcctggccaacatggtgaaacctcgtctctactaaaaatacaaaaattagctggatgtggtggcacgcacctgttgtcccagctactcaagaggctgaggcggaagaatcctttgaacctgggaggtggaggtcgcagtgagccaagattgtgccactgcactccagccaggggtctgggagacagagcaaggctccataaaaaaaacaaaacaaaacaaaaaaaaaaacagatcagggaccctcagccccttgtttgccaaatggggctaacatccatccagcagagctgttgtgaacatcaggaggaggagatgttcagcatgtagccagtgcctagcggccttctgtgcttgcttcagtaccagcatttgcagtaagtgaatctgaaatattaattcattaggacaatctaaagcacatatgacattaatacccagactcttcagtctacaaaagaccttggtgggggaatcatttattccaaatgtccaccaagcgctagcataggggatctgggctaatcaggatttctcaggaggaggctgatgaggctggaacctggggaggaaaaacttggcccgttcatcaaccaagacctgggaggctggatgggagtaagggatccacaaactgtggattgtgacctattaatgggtcaagaagtccttctagttggtgaagaccactatgataaaaataaactggctgggtgcagtggctcacgcctgtaatcctagcactttggaaggccaaggcgggcagaccacgaggtcaagagatcgagaccatcctggccaacatggtgaaaccccttctctactaaaaatacaaaaattagctgaacatggtggccgcacctgtagtcccagctactcgggaggctgaggcaggagaatcactctcacccaggaggcggaggttgcagtgagctgagatcacgccactgcactccagcctggctgagagagtgagactccatctcaaaaataaataaataaataaataaaataaactataatagaattggaaattccagagcccattgcacacagagtaagtgttggtctgtgaaatgtttgtcttagttataggcgtatatatgcatgtactaagttgccatggaaagtgtattttactttgggtaaaggtaaaaaaagatttgaaagccaaactttttggcttggtgttcttcatcagttaaaaaaatattgttttttgtttggctgggggcagtggctcacgcctgtaatcccagcactttgggaggctgaggccggcaaatcatctgaggtcaggagttcgagaccagcctaaccaacatggtaaaaccccatctctactaaaaatacaaaaattgggcagatgtggcagtgtgggcctgtaatcccagctactcgggaggctgaggcacgagaatcgcttaagccagggaggcggaggttgcagtgagtcgaagtcacaccagtgcactccagcctgggcgacagagcgagactccagctcaaaaaaaaaaaaaaagaaaaaagagtaaaaacagaaaaaagaaatgttaagtggtggggatcatgtacaaggtttttctttgtaatagcaaacatctcataacaatacaaatatccatataggccgggcacagtggctcatacctataatccaagcactttgggaggatcacttgagcccaggagttcgaagtcagcctgggcaacatggcaaaaccctgcatctacagaaaaacacaaaaattagctagacatggtgatgtgcacctgtagtcccagctactcaggaggtggaggtggacggatggcttgagcctgggagtttgtgccactgcactccagcctgggcagcagagggagaccctgtctcaaaaaacaaaaacaaaaacaaatatccatgtaatggaaaatcataaaacagtaaaaacgactgaaccagagctacatgtatcaagatagatgaatgtcaacacaaagttgagtgaaaaaagcatgttgcagatgggtatgtgctgaataatatcttttatttgtacaacatctacaaacgtgaaaaataatagatcttgcctagggataacataaatatgtaagaaacctataaagacacacattgagtaataaatacacaatttaaactttactgtactcattacttgtcggtcgaaggatggggactttggtgggagacagaagtgtctggggggctttacccatagtgataagattttatttctaaaggtagatgaggagtaaatggaggtttaatataatattcttgatatttttgtataagtctaaaatacttcataattttaaaaaattcagagtggaagaaataagtttttgagcatccacaccaacatatgtatatttgttttattttatttttgagacagggtctcactctgttgcccaggctggagtgcagtggcaggatctcggctcactgcaacctccacctaccaggctcaagcgatcctcccacctcagccttccaagtagctggaattacaggcaaccgccaccatgcccagctaattttttgtatttttagtagagtcaaggtttcgctatgttggccaggctggtcttgaactcctgacgtcaggtaatacacccaccttggcctcccaaagtgctgagattacaggtgtgagccaccgcgcctggcccatatatgtatttgtatttctgttaattttacgtgctagatattaataggtattattaaatgccactaaaatgtaagtaaatattagtaattccattaaaatttaaacaatagtaaataaacattagtgaaattgaatgtattacttccataccccagtagatctttgtggttattccctggggcatttgcaccccactttggagggaggacttgccattttagcatgttttttaaattgtggtttgcagaacacttgcatcaggattttctaagctttttttttttttttttttttttgagatagagtttcactctgtcacccaggctggagtgcagtggtgtgatctcggctcactgcaacttctgccccctgggttcaagcaattctcctgcctcagcctaccaagtagctaggattacaggtgccaaccaccgcactcagccaatttttgtgtttttagtggagacagggtttcaccatgttggccaggctggtctgtaactcctgaccttgaatctgcctgcctcggcctcccaaagtgctgggattataggcgtgagccactgcgcccagccaggatcttattaaagatgcggattctctagtcccatgctaactggggaccagggactaaaagtctgcatttttagtaagtgccctggtgagtctaatgcaatgctatagagcaatgaggctgttccaagctgtttgcaaatggctggggatgctggtaagtcaggcccaaggcctgccctcaggtggaacgggctggggtggcctccttcatctgattcacctgtctccccttttgctccaggaagccgctgccagtagaggattcagactgcagctctgatgagaccagcatctctgccttctcatccaccttgctgaaccccatcaaattagctgtgacccagcccaacagcagcttctttgcagggatgctggagggggagctgaacaaactcagcttctccccaatggccaagaatgcagaaaatgaggacctggcgctcggcccctgcccatgcccatcgaagtcccagatggccacaaggggcctgctggaccttgacaaccctgagctggagacagaaacctcctcaacgcactcagaatcttctgtggttgtggacctgccggacacccccttcatctttgagcacaccgtcaacaattccacagctgtggtgcgtttcccttgctcatgcgttcagcagaggcttattgtgccaggcactgagctgagctccatgggtagtgagaaggtgcctgccacctgcatgtcgacctcaagttcacggtttaggaagggagaggatgtgtctgtaaaaactccagtgcaagacagaaagggttcagtgctgtaggaaaagttcagagcaagtgccaccaggaattcagagggaaagatatttccagatgcgggaataagcttggtggcttttggtaacatctgagctgggatgtagaggtagcatgtaaacatctagaggtggaggagggaggcattccctggaggggcggaccctagcaaaagctcacaggaaagtgagggaggaaatctcaatttgaacaagatggtaggtgatctgtaggaacatgaaagcgtgagaagccctggatgaggacctgggatcgagtgaggctactcagaattgctgggcctcctccctagagggtctagggtgaagcctgataatttgcattagtaacagattcccagaggatgctgtggctccccgtccgcgggctacacgtcgaacaacaccgtcctacactatgggaagtgaagacaggggacaggatggggaatgttagtctgggatcatcttccagagtcctccagtgttagactactttatagacttttctgtaagtaatagggaacagctttgtaaaaagcttcacatcagatgatgaaagcaattcgagctgtatcttgggaggatgcctggaattccactgttggatggcccagagcagtgtttctcaaagtgctctccagatggacaatgtcagcatcactcagcaaattgttacaaatttaaattctcatctccctccaccacatttgggcctcctgagtcagaaactgttggggcggagcccagtaatctatcttttaataagtcctccagggtattctaatgcacaccaagtttgacaaacactggcctagatggaggagaaaccagacaggaggcagcaggcccagaaatctgcagttacaaaatctccctgagatgcttagccaggcttggcaaccattgtagtacaaagtgtatgggctctggagctatgggtttgaacactggctgtcacttaattgccgtatgatgatggaccagtcacttgccctctctggacctagtcgataagatgatctctaaggtccctctcagctaacagagtctagacagagtctagaaccaacctttttggcaccagggactggtttcatggaagataatttttccatggatccggttggggggatggtttcaggatgagtcaagcatattacatttattgtgtactttatttctattattattacattgtaatatataatgaaataattatacaactcaccataatgtagaaactgtgggagccctgagcttgttttcctgcaacgagagggtcccatttgggggtgatgggagacaatgacagatcatcaggcattagattctcataaggagcattcaacttagatccctcccatacaattcacaatagggttcacgtgcctatgggaatctaatgcctctgctgatctgacaggaggcagagctcaggtggtaccctgagccgtggggagcagctgtaaatacagatgaagcttcgcttgctcgcccaccaatctcctcctgctgtgctatccagttcctaacaggccatggactgctatcagttggtggcccaagggttgaggacccctggcgtataagaaatatggaatgagggtgtaccctaaagtgggtggggctgcccaggagagtagtacatgcttcggggcaggggttccacactcagtgctgcagtaccttgcaccttccatctgacctgcctgggccccagcaggagcaggggatgggcatgggacgtcctgaccccagttgggagggtgaagggacaggaaggacaggacatatctgaggaagcctcggggctctctcttcccctagatttcctggacctacgccttgggcaagcagccggtcagtttctaccagctcctgttacaggaggtggccaagacacaggagaatgagttgcccgaggcaaagaatcgtccatggatcttcaacaagattttgggcactactgtcaagctgatggagctaaagcctaacacgtgttactgcctcagtgtccgtgcagccaacacagctggggtggggaagtggtgcaagccctacaaagtgagccctgggaaaagaggggccttgggggtggagagaagtccaaagccagggaaccagggctttggaggttgggaacacccctatgcccacatgactcatctggctagctttccttctgcctgggtcaagaagcatcaattccagaatgcatgcttctgggaggtttaaggattaagccactctggggcccactaggaatgcaaacgaatgtatttttcaacatcactataatgttccccttccaaagccattggtttttagactctgcaattcagtgcccatgattgtgagtaggctgggaagtcaagggcattgaaagaaatagggaagacaagaggctaaagggggacgaagaagggaacagcctgggtatggggtaggggtatgggggtatagaggcctgagtacagacagccctttggttggaaatatcccataatgaggaggtacaggcttgagtcatgcatctttgcacctgtttcctgcgtcaatggctaggttggataaggctgtttaaggtctgagtcagcagacagaaaaaaaaggggtgatagagacagagagagagccaggttcagatctgggaaggaactctgaagggttttcttgtttcacttcagtttgcaaccctggccactgacttcagcagctttcctgagaactaccccatccagatcaccgtgcggcgcaaggaaccccggcaaaagatcgtgtccatcgggccggaggagatgcggaggctggaggatctggaatacctatttccctgttaagggggagggccccaggacacccctcacctactttcagcttcaaccccaggccctcagaaaccagagccatgagacctaccataccaccagcaccctgcgggcccggggtctggcagagtggtatgggcaccccacccctgggctggggccaaggctacataggggccccattcacctggaggcatctcaggccaggccatgccaggctcagccactgcccacagctgctagactccctcctcctccaaatctgggctgggtctaggtccctcattaaagaactgcaggtcatccagcaccctaaagtctgctttatgctgcagacagcctcagatgggctggctggcacccacctcctagcttccaccaggacagagtctacatgggtggggagatagaaaacaggcagctaggcaataggatgctgccatcaccccttccccagtggggcggggtaggggaacagggagactggtgctctaagactaaaaggctcttacaccagaaaaatacagaaatagctgtcatggacagacgtggtggcccatgaactgtcaaactagcttgagctctggacggagggatgtggtacaaagtgcacaataagctttggggcagggcctggtttaatcccagctttctcttactagatgtgagggcatgggctaatcatttcttatgttgtttcctcatcaaaagttttggagcttgagaaccttccaggcctggtgcagtctgagagcacagcagacaaacagctggcaccaaggagctcagtggctgatagttttgttcgcttcttatgtagcctcactgcagatatgtgcaaggtggaggccaagcaccacagctaggtgacgcgcaaaacccaaaagcacagacaagggtggaggagggtaagaaggagcaagatgctagttctgagcagtttatacaaggatggtttggaaatccaatctgagtagttcagaccatgaccctgcttagcatgggatgcaggagaaagcagaggcagggtacattcagggcaagatctcggcctggggtctgagtcctgatgggaattcctttcactgcttgaaagttctcgtggcaaagaacttcctctgtatcaacaatacccacttctgctcagagctcatactgctgcctccccatctgagggaatcctctggaagagccatcaccttccccgctctatcccatgggcccagggcagtgcttggtgcctggcagggcctcaagcagtgtgctatgcgaaggcagaggcatcccctggagcagggctgaccagcagaactctcttgatgatgaaaacctttctgtgtgctgtccaatactggaggccttacccagtgcgatggaggaactgcacttctatttcatgccagcagtcacatgtggccggtgcctactgcagtggacaacaatacagccctagattctccttggccactatcacaactggcctctctcttaccaacacgggggaagagagggaaggcaagtgcctggtcagtgtggttttggcgtagtccagtgcaagggcgggggctggacaatctcatttagcacagtccttgattgagtcatggggattctaggacaaggaattagaacccaacacacaaaacttaagttacttatttggtcatagaacctgggatctgaccctgtacagagctgacactaggggcccactcatagagcctggctgcccaccacccctgtctgtaccagcaaggtacagagtagcagacacgggccaagttcagtgacaacttcctgtgaccttcgatttctggctctggggtgtgccacaggcggggatctgtgggaaaaccccattccggtctatcgaggacagcaggccacacgcattctcaggtccccactggtggggagggtgtgtgcactgccatctcagcctttgttctctggcagggaaggcagctggcagaggccgagtcgaggtgggggtcagagagaacttcgggccgtctcatctcctccatctgtggagaagggaagggtgtcaggatggggattccaccttaggaaagggaggccgtcatataatcccagtgtcaacagacggacggcctgtggtccaccctcagagtcaccaagagccaggtgaccgtccctgctctgcccacccaaactcaggctgcccactcactgcctgctgccaccaggacctccacccagggcctggccctcgggatgcccaccagcaaacagtcacaatcccttataagcacacaacactttgtcttccagagtgttgaccctcctatttttgatcctgtctgtgaaggtttgataattcccaagagactgattaaccaagttctctgtgattactccatggcagaaccaggatttgaactcaggtcttgcgactctgaagtctagtgacagaaagacctggatgcgccctctacaaggtgtcctgtggcccctgttgttccggtggccctcccacttgcccactgacagaaagacctggacgcgccctctacgaggtgtcctgtggcctctgttgttccggtggccctcccacttgtggccctcccacttgcccactgagaatctggctccacacgcctcctcaagacagtctgagcacctggacggccctgcggaattctatgctgtaagggaaagtgtgcacagaaggaccttaggggtaggagggctgtgtatgccaaccaccacttcccccacactcacatccggaggcatttgtccttcccaccacttgccactctctggccatctggactccagtcaacagcatatacctaaagggaggcagaggaaggcaggtggggtggtgagagggagacagccagccaggctccaatcccagtccctcctttgcctgagggttggccctacctcatccgcgtggccgggcaggtccatggccagcttctgggccttcacatcccacaccttcagtgtgctgtcactgctgccgctgaccaggagccgactgtcagctgaccacgcaatctggtacacggcagccacgtggccgcgtagggaagccaggtacctggtccaggagaagacgatgatggattttagtctgagttacatctttcaacacgtctgaagggtcccctacgctcatggcagtggttctcaacctcggctgtctgttagaaatacctgggaacctttacaaaatcacactgcctggtccccatcccagaccatttttaatcattaccagtcattacaatttgtaaaacttctccaaatgagtagcttctagcatgcctcttgcttgccctccatacctgcacaactttgcatgccttagactccaacgtggccatctgcttagcccatctgcctgtcatccccccaaacagcaagtgcctgctgacaggtggcatggagtaacagtgggcccactgaactttcacgtcaacacagtctagctgtttctctttggacaaaccatcaggcctctctgagactcattttccttattttaaaaaggaacccaattacctatcttaaagggttgctgtgtgaaaacacagtgacgtcactaacgcagaggtccccccttcagccctaacaaggtttccctggctctttttctcccccttgcctgtgcctttgcctctcctctaatccgattaaccccaagagcactgtgcctcatcacaccaagggttcccatacttgagtgggtagcagagtcacctggtaactttgttaaaatgaagaatcagatccacaaggtctgagttggggccaggactctgcatttctatcaagctcccaggtgatgctgatgccgctggtctgtggcccacactttgaggagggccaagtaacaattgtaccacaagcctacctaccaccacttcaccttctccagggctacagccctacctcttcagcagctagctctaagatcacttctctcctaagacataaactagcatttttttttttttgagacacagtatcactctgttgcccaggctggagtacagtggtgtgaactcgactcactgcaacctttgcctcccaagttcaaatgattctcctgcctcagcctccggggtaactgggattataggcacgtgccactatgcctggctaatttttgtatttttagtagagacagggttttgccatgttggccaggctagtctcgaactcctgaactcaggtgatctgcctgccttggcctcccaaactcctgggattatgggcatgagccaccacgcccagcctgaactagcatttttagtgaccacttagtgcgggtcctaaacatactgtctcattaaatccgtgtaactaggctgggcatggcggctcacacctgtaatcccagcactttgggaggccgaggcagttggatcacttgagctcaggagttcaagaccagcctagtcaacatggtgaaaccccgtctcaactaaaaatacaaaaattagccaggcacggtggcggaggcctgtaatcccagctacctgggaggctgaggcaggagaatcacttgaacccaggaagcagaggttgtaatgagccaagatcgtgccgctgcactcgagccacttgaacaccaggtgacagagtgaaagtcatctctaaaaacaaacaaacaaacaaacaccttgtaacaaagctgagaggtagggggtctgcatattaccaaagaggaaacagtggcttagaaaatccaaacacctgccaaggccatacagctagtaagtggcagtgccaagcccctcccaccattcactccttacagagaagcagtacccacccctactcacttgcccgtcctgccatcccacagcttgatggacttgtcaaaggaggcactagccacgatgcgggagtcaggagagaagagcacctggttgatgagagcttggtgtcctgtcatccgagtgagaggctttttgtcctctgctggggaccacaggaataaggtgaagtcgtcggagccagacaccagcctctctggaccctggccctaggggaggcagaaagcacactgtgttgggtgtggtctcagaaagaaggaggagggcccgactttggcagcaagcatacaccctgattactcaatgccagggacagagagaggccagcgctaggagcaatgaggactggcttggccactcactcgcatgtgaccccaggcaagtcacttcatccaaaaggaaaaagaaactctacatgcatgtagaaaaaaattttaagatacataattacagaaaaaggcacaaaataatgtgttaaaagaaggattttatgtatgtatgcatgtgtgtgtgtgcttatacatatatactgtatatagacacgtgtctgtatattaaatctctggaaggtgattcaggatactggtggcactggatgctacaatagagacgggagactccgcgatctaccttttgtattttttgaacgtgaatgtgtgaacaatcttaaacaacaaattaaagtaaaaaagaagcatgttggaaatgtaataaatagacaagcaaataaactaaacaaaaaacgaaataaaatgatctctagcacattagtattttaggattgcaaactaggattatgaagaacaactttttggaataggtacattctgagctgggtctagaagggagaagggtctgagagggttttagtgattggctaaggactggtacagagctaggggtgcacgtggctggcacacactcacccgcacgaggttgtatcggctcagagccctctccttcaactcctgcactgtgaccaggtaccggaggggagaaaaggagatgaggaagaaggccgataagaaaatccaacacaaagagcaaacactccccattaagcttgagaactggctccttcccaatcagcccccgctcttccttctcccaatcactcacaggatccttggaggtcttggggattaactgaggcctcagcaggttcaaaggccccagtgcgcagggcatagtcagtgctgagggccatggtgttcacccagtggccgtggccttgcagagtccggcacagcacaccctacgggagagcgagtcaggtcagacacacacactcctccccacgcctgggcgattagccccaggagacaggtggtacaagactaataatcatcatcactcatgcattgtgatcttaatcaaactacccctctggggtcaagtctctccccacttgtaaaatggagtccagatcatgaaaatgtttcatggaagaggagttagggatgtcagagtaaacggctcctgtccaatacatttgggatatggtagatctgataaagcccaacagctgtcctacaggaggaatttccagagtgtgacgatctcatggggactctgcaatctccactatggtgcagcaccaaccacagaactcctcattcccaaaacacctccctagaccagggctcccagcacacatctgggaaacactggactcgctgatgtcaaggtcattctgagtgccagcatcttgtgacttgcgattttctggactggtttctgaaccctcccagcacttacgtcatgagctctccagactttgatggtgcggtcctgggaggcagagtagagaagcccgtcccctccccaccggagacaggtgaccgactgggtgtgcccggtgaggatgcgctcacagcggcctgcagttgtgtcccagatccgcacactgccatccttggagctgctggccacatagcggcactcagggttcctggagagaagggagatgtgacctcatctgtgacctggcaacatctgtgtgcccatggcacctccccattcccaacttaaaggccatggacaatcttttgacagcttttctgacaccaagacccggctgcactgcaaggtgactgcaaccagcagaccctgtgatgagagcctctcccaagcagcaatgcaggtctgcccgagacccttctcccatgcctgccaagccatcacggtcattcaggctgcccatcttgtcccctcacgtaaaacttctatgcattgggcagggaaaggggatggctttgatcccctggctcatttgtcccagctccgtcagtgtcacttacgcatggaggggctcccagctcaggcctgtgatccacttgctgtggccagcgagggtcctgcccacctgcttccctgtgcttgggtcccagaggagaatctgaaggacagaagctcactgaataatcctccccaacaggtctctggctccaccaaaatccctgcctaccacttcccacccaaccctccccaaagactcctgaacctgattctgaactgtctcctaggaaggcccccttgagtctctgcctagttaccctgagaactacctacctggccattcttgcagcctgaggccagcttcctgccatctggagaccaggatatactaaggacccagtgtctgtgtcctaagaaagcagaggagggagaaataagggactacatctgtctttatcccaagtgcccagcagtgcctgtcaggtgccaggtactccttaaccatttgaataaatgaatgattgaacaaaaggagcgatgaggctttctggggatggatagaatgcaccccaagtgttagagctctgcatcttgctgcatggataacaccatcactctctaatgactccttatgtgacacatgctatgaagtgtttttgtacatgtcatcccttgttatttctcacaagagctctaagctatggagcaaagcaagaattatcatccccattttccagatgagaaaattgaagcttagaaagggaacatgccctacacacacaaggtcacttaactaatctgtggtatagcagtggttcttcaagtgtggtcgtcagagcagcagcatcagcatctcctgggaacttgttagaaatgcagattcccaggccctaccccaggcccaatagaactaaacctctgggggtggggcccagcaatctgtatttttttctctcttctcttttctctctctctctttctttcatggagtcacactccatcacccaggctggagtgcagtggtgccatctcggctcactgcaacctccgcctcctagattcgagcaattcttctgcctcagcctccccagtggctgggattacaagcacacgccaccatgcccggctaatttttgtagttttagtagagatggggtttcactgtgttggcgaggctggtctcaaactcctgacctcaagtgatctgcctgccttggcctcccgaagtgctgggattacaggtgtgggccaccacgcctggccagcaatctgcattttaacaagcccctgaggcggggcaattctgatttgtgctcaagtttgaaaaccactgtggcagaggcaggatttaaaccaggttctccttggtagcagtcagtcagcctctcaccatgtcccatattgactccttggtgcagtttctgcttgtgtctaagtggctggctgggctcaaggacatggtctctacctaggaacagacagccgccaactggatattaaggggttgtaatctgcaaagtgagaccctcatctgtatgaaaacaaaaaacgagccaggtgtgatggcaagtgcctgtcatcccagctactctggaggctgaagtagggggactgcttgaacccaggagttcaaggcttgagcccaggagttcaagtgagctgtgactgcaccactgtactccatcctggtcaacagagcaagaccttgtctcaaaaaaaaagaagaccccctaaatggctaattgcatactgacccttgcatgtgaaatgtggtgtctctgtgctgagatcccagaagcgcacggtggtgtctccagagccactggccaggtacctggggaagaagagaggatgcttgacactgcacatgtgcatttgtgccacctattcaatcactttctgtgaatagaatatggaactggactctttcctcgcccctggaagggagaaagacaatactgatgctgtcctctgggagaatacatcaggaggccatttctttcctctccacagctataaccagcttttgaagcttctcattacctttctaagtttgagagaagcaactaatcccagtttcacagatgaaaaattaactcggaaaggttaagtgatttatacaagtcacacagctcagatcttgaaaaatcaagtctaggagaggtttgtccaaggcaggggtccttaagcagcctttggggaccatgccctactgaggaagtcccttaattgcaagctgagtccagagcttgggtctatggtaggcagccctgaggccccatcaattataactctgggagaccctccccaaaccaggcaaagactgcacccccacataccccctccatgagtctgcagctgtccttactttcccgtagggctgaaggccacagaaatgactgcctcactgtgaccctccaaggagctggtgcagcgagtcacagcccggactctgaagatagcctgtggctggtagatgatgtctaggaccttctctgtctccactgcctgggactccaacgtcttccccagtgaggagacgatctcagcatcgtggacaaagaaagccagtggcaggggatcctcctgaaggacaatggtaaaggacaaacccgcaacaatggatgtgcaggggcaccctctgccagggatgctccccactgagctgtgggaggtgaagcttcttcttttcagccatcgtgctagggatacccccatcattgcccattgagcaagaccttttatttatttatttatttatttttgagacaagagtctcgctctgtcacccaggctggagtgcagtggagcaatctctgctcactgcaacctccgcgtcctgggttcaagagattctcctgcctcagcctcccgagtagctgggattacaggcacccatcaccacgcctggctaagttttatatttttagtagatacggggtttcgccacattggccaggctggtctcaagctcctgacctcaggtgatccacctgcctcggcctcccaaagtgctgggattacaggcgtgagccactgtgcccagcctagcaagaccttttaagtcactgaacagcagttgcaggacacttacacagcacttggaaattcttttttcttttttttttgagatggagtctcgttctgttactcaggctggagtgcagtggtgagatctcagctcactgcaacctctgcctcctgggttcaagcaattctcctgcttcagcctcccgaggagctgggactacaggcgcctgccaccacgcctggctaatttttgtattttcagtagagactgttttcgccatattggctaagctggtctcgaactcctgacctctagtgatctgcccacctcagcctcccaaagtactgggattacaggcataagccactgcacccggcctgaaattctttatctgcatctcataacaaccgtgggaagtagatactaatattcccactgacagttttcaaaagcagaggctcagaacaactaagtaattagttcaatgtcctattgccaatgattaattcaggttctttacgtccaagataggattagcatatagcattatgcagtgtttcccaaactaccacactacactatatttgtgtaaaaagctcccaaaacgcctgttaaaaaatgtagactttctgcttcatcccagagtttggtttagtaaggctgggatggggtccaggaactgcaattttaaggacctcccctgtccccagggcagctcttcagtaaacacactggcttaaaggttaaaagcaaaggccgggtgcggtggctcacgccagtaatccccagcactttggaggccaaggcgggaggatcacgaggtcaagagatcgagaccatcctggccaacgtggtgaaacccagtccccactaaaaatacaaaaattagctgggtgtggtggcgcgcgcctgtagtcccagctactcgggaggctgaggcaggagaatcgcttgaacctgggaggcagagattgcagtgagcagagatcacgccactacactccagcttgccagcctggcgacaaagtgagactccgtctcaaaaaaaaaaaaaaaaaaggtaaataaataaataaataaaagcatgggtattcggatagttttgggttccaattccaaatctgctacctactacatagcatcgtgcaaaatactgagtccctccgggccacgctgtaaaatggggatattaacgtgtcccagactgggggactgtgacaaagaatcaatgaaatacagcatccggtgcgttcaaagctaggcccctctccgcaggtggacccctttggttggcgtgtaaagcgctatgccactgattccatctctgacataggtgggagctcacgccaggtgggtcaccacagtccgttagcgggggaccatgaaccgcagaccctcggtaatatgattcccccaccgcatccgcccgggggtggagatgcgaggccgccctggccagccacttacctgggccagtagcgcgttgcacacgagctgcagcctgtccggggtgatgtccacgggcacgtcgaacggggaacccagcagctgcccgccctcatcctggaactgcactagcaaccgctgcacatcgcgcgccaccgcctcgtcctgcgcgagcaagtggggcgggagtcagtctggtcgcccgcccagaagggccccacttcgcctctctcaggcctcagggacccgggccctagcgccccgcggcgacgccccccgcccccatccacgcacacccaccggcactgctgccgccatcctgcgtccccacgtggaggagaaagagcccggcagacagagcgccgtctccgtggtcgggcggggtcgccgccggccacatcgccctctgctgttggggaggagaagcgtcccgctgcgcacggcctcagggattagaaatgggcttacctggtgctcctcccgcccctcaacagccttcacatttatttttcgccagggtcttagaggacacagtaaacttttgactcttcacaacagggattcttgccccattttaatttaatttcattttgagacagagtttcactccgtcgcccagactggagggcagtggtgccaccacggctcactgcagtctcgaactttctggcacagcgatcctcccacctcagcctcagagtagcctggactacaggcacatgacaccctgcccggttatttttttctcattttttgtagagacgaggtctcactatgttgcccaggctggtctcaaactcctgaactcaagcagcaagtcccccactccccagcctcagtgtcccaaagtgctgggattacaggtgtgagccaccacgcctagcctagaaattagtatccttttaaaaatggatcaagtcaaggctgggcgtggtggctgacacctgtaatcccagcgctttggaaggcccaggcgagcagatcacttgagtccaggagttcgagaccagcctggccaacatggtgaaaccaggtctctactaaaaatacaaaaaaattaaccagccgtggtggcatgcgcctgtggtcatagctactggagaggctgaggtggtagattctcttgaacctgggaggcagaggttgcagtgagccgagctctcaccactgcactccagcctggatgacagagcaagactctgtctcaataaataaataaataaataaataaataaataaataaataaataaataaaatggatcaactcaataatactcgagtacaaaagcaaatcatttctacaatcatcaatgctgtaaagcaataatagtgataatgacatcaacaagtcaggaattgttctaagtgctttcccacataactcatttaattcttacaacccttttctccccatattactgaggaactgaagcagacagcaatgaacttgagctcttttgcctgaaacgaaggatctcccttgccaactctcctctctctccctccactgctcaggcagtctcaagctctgccaagtcatcctcatgaacacagcttgaatctgctctccccatctccactgcctcactctggtcagagtcaccatcatcacctgcctggaccgctacaacagcctcccgatgagcccccccatttccattcctgcctctttctacccattctccacgatgcagccagggttatcttttcagaccaaaaatctggcctgctgctcttcaccctcaaaccctgcgacggctcccttacatgcaggaaaaaaagaacactccttataatggtcaattcagccttgctatgtccagccacccctctctttaggttaaatcttgctggctttttctgagttcttacaaggcatggctcttcctgcatcagtgattttgcccatgcagttttttctgtctggaactgttatggagtgaattgtgcccttcccctaattcaagcttgtccaacccctgggccacaggctgcatgcagcccaggatggctttgaatgcagcccaacacaaattcgtaagctttcttaaaacattatgagattttctttcgattttttttttcagctcatcagctatcattagtgtattttatgtgtagcccaaggcaattctttttccactgtggcccagagaagccaaaagattggacgcctctgccctaatttatatattgaagccctagctctgaatgtggctgtatttggagatagcatatattattattattgttttttttttttttttttagagacagggtctcactctgttgcccagactagagtgtagtagtgtgatcatagctcacacagcttcaaactcccaggctcaagtgctcttcttaccttagtgttctgagtagctaggacaacaggtgtgtgccactatacctgacactcggctaacttttaaaaatttttgtagagacaaggctgtcactctgttgcctaagctggtctcgaactcttggcctcaaatgatcttcctgtcttaggccttccaaagtgctgggattacaggtgtaagccaccatgcctggcctggagatgggccctgaaaggacataggaagggttaataagtgagtttgtatgggtaggacactaatcagatagaactggtgcccttgtgaaatgaggagactccagagtactctctctctgtctctccccgccccccgcactgcctccctgagcacacacaaagatgaggccatagtaggacacagtgagaaggtggctgtttgcatccaggaagagaggcctcaccagaaaccaaccctcatggcaccttgaccttggatttctctactccagagctgtgagaaaataaatttctgttgttgaagcctccctgtctgtgctattttgttatggtagccagagccaactaatacaggaatagttcctcattcttcaggtcttgccttgaatatttattcattcatccaataaatgtattgagtgcctactctctgccagacgttgtcggagttctatgtgtatcaactcatttatcacttacgcagggaaacctttgaaatgatgtcatatgatgtcatatttccctgttgtatgttttcaaaacatcctggtattcctcacatttagaaatcacagatccagctggcacagtggctcacacctgtaatctcagcactttgggaggccgaggtgggagtatcacttgagcccaggagtttgagaccagactgggcaacatggtgagatcatgtctctacaaaaaaaatagccaggtggcatgcacctatagtcccagctactcaggaggctgagatgggtgaattgcttgaacctgggaggtcaaggctgcagtcagccgtgatcatgccactgctttccacttgtgacagcgagaccctgtctcaattaaaaaaaaaaccaaaacaaacaaacgaacaaaaaaaagaaatcacagaatcacagatccatggaattatttcattcattcattcattcaacaaatagcattgagcaccttctttttattttttcttcttttttgagatggaatcttgctctgtcaccaaagctggagtgcagtggcatgatcttggctcactgcaacctctgcctctggggttcaagtgattctcctgcctcagactccttagtagctgggattacaggcacccgccaccatgcccggctaacttttgtgtttttagcagagatggagtttcgccatgttggccaggctggtctggaactcctgacctcaggtgatccgcctgccttggcctcccaaagtgctgggattacaggtgtcagccactgtgccccacaccattacaaacgcttggaatatgtgagggaacaacatagacacaaatccttgtcctcaccagtgttctatgcttcacagttcctcacacataataaatgtttaagaaatgtgggccaggcgcggtggctcacgcctgtaatcccagcactttgagaggcctaggcaggtggatcacgaggtcaggggttcaagatcagcctggccaacatggtgaaactccatctctactaaaaatacagaaattagccaggcatggtggtggatgtctgtaatcccagctactcatgaggctgaggcaggagaatctcttgaacccagaaggtggaggttgcagtgagccgagatcgtgccactgcactccagcctgggcaacagagcaagactctgtctcaaacaacaacaacaacaacaacaaaaagatgtttaagaaatgcttgtggaatgaattactgaatcagcatttgaatataagatcccttggacctaaagtcacagaaccgcaggtctctgccaatgtcaggatcctttatcctattacctcattgctgcagagagcttgccccacaaaagggcccagggcttgtgataacatgaaggcagggaattcatccatctattcattcatttatttgctcattcaacaaacatgtgttagggctgggctttgtgtccagcagggcgctacaacttgtccaaggtcatatagctgtgtgtccaaggtcacaggtctgcgagtagaatctagtatgaatgattccacctgggattttcttcagtgtctttctcagctctggccagataagtttgaagatatgtgtggggtggaggggagagggatgagaggtgagtggaggaaatcatcatcatgaagacaccattcattcattcattcattcatccatccattcattccattcaggaaacacacttcggacactgaatgtgccagaacctgtgcaggaagggggttgggggacaagctatatgggatgctgtctttgccttccaggaggaagctcacagcccaggcttgagggcactgaaatgcagaagagttctgggtccaactggggacaacgtcataaatttgcttcaggaactcccagttagctaaggagaaacattcctgcctcaggagagacccctctgcaatggtgaatacatagttcttgtcccaggaagacccccttctgaggagggagcctcagtgtgtcccaggatagtttccagtcgggtggggaggacccttggtctcgggggaattcccagtctgacccagcccttgccctaagagatctcagcctgatgggggatacacaaagcccactctctgggagctaacagtcagatgggagaggtaggctgaatagatccactctatacacagggggaggaacaggagaccgcatgtggaccgaaactaacgaaccactcactcacactaaactgagttagcaagtcctgttggtctttctgaaaagcaaagacattttgaacaggtgaaagcagggtgggttgaggtgttgcgcagaagtggaaaagggaaggaactttcttcccctgttccttccccgctccctccagaaaggtatttctggaactctccagttggtctgggatctgggcaactgctgtgtgtcccagtctgtcagcccctcagctgtcactctgctcccaaaaatagcaatggttgaggggagggagaggaagctgtttatctgggatagatgtggagaggtgcattagagctgtgcccagggagggagtctgctggggggttcctgtcccttctggatctttctgtcactctttggaatgttagtgcctaagccccccaccaggataacccagagtggggtgcttgggcggaggctggtcagcacctccacgtggtcatgactgaccagtctggggagggggagggccctgagtatcagtgacagactccaggggcacctgcccctgtggccaaatatggtccagagccactggctgaggcaagaaaatctcttgggtgggggctgggaggggcagactgaggctggctggctggaggttgacacaggagtgctcaggggagcagcatcacaagagggcagatcgaaagcatcgtccttgctgaaaaagtgagcatgggcctggggtgtgccctggactggggagggagacggcaaacttctaagacctgcaatgagagttcaggcctttggcacaaactaagcagcttcgcctgctcaggctgggagggacagagagtgaggcacagggactctcaacttgggccaagctctgagcaaatgctataatgtcctcatggggcaatagatttgggggttctgggggtgggtcccttccaggcagaatccccaccatcctctctggtgtgaggggaccctggagctccggacctcaggccaggagcccagccctgggtctgcagtgaggggctgaccagacagagcttctcctgtcccagcagatggcagaggtggaagcggtacagctgaaggaggaaggaaaccggcatttccagctccaggactacaaggccgccacaaatagctacagccaggccctgaagctgaccaaggacaaggccctgctggccacgctttatcggaaccgggcagcctgtggcctgaaaacggtctggggcagggcagggcacagggtgggagtgaggcagaggggctttggggctgagtggcagccccttcaccctgatagaaattgcccttcatcccagccgactctcctggatgcctggggttggagaagggtgcctccaaccccctgacccatgccccggaaagacagaaattcatccagagcagaatcagcccaatgccaggtgctttcatgtgttattcatggcatcttactaatggcccgtgagatagctgttgttgtcctccccctatcgcaggtaagaaactcgggatccagagggcttcattcattaacttgcccaagctctcccaagtagtagcagagccgagattcaaacctgggtttgcctgatgtcaaagcctgtcctctttgccatgcctgtgaggagcatgccctgggcctctgacagcctgcagctcccccaggaaaccctctccccacactgtggggacactctctggccatctctgcattgggcccacattaaccgagtctccttctccttcccctttcctcaggagagctacgtccaggcagcttcagatgcctccagaggtgagcccctcccacctccaagcttgccctgtcacattctcctctgcatggcctgggttttaatctagttaccattttgggggaagaaacagtgagtatggagtgacttcagaagggagagaacaagctggagaagggactggaaacatatcctgtgaagagcagttgagggaagctgcaatatttagcccagaaaaggcaactcccaggtgggtcagagagctgccttcaaattcctaaaaggctgtcacaaggaagaaggattggatttcatctcaagggttccagggctgggcaatgttacagggaacacatttcaggcagggagagggaaatgttttctgattaagctgcctggctgtcttttgttgttgttgttgtttgttttgttttgttttttgggttttgttttgttttgtttttttgagatggagtcttgctctgttgcccagactggagtgcaatggcatgatctcaactcactgcaacctctgcctcccggattcaagcaattctcctgtctcagccttccaagtagccgggattataggcgtctgccaccacgcccagctaatttttgtatttttagtagagacaaggtttcgccatgttggccaggctggtctcgaactcctgaccttgtgatctgcctaccttggcctcccaaagtgttgggattacaggcatcagccactgcgccaggcccgcctggctgtcttgaggaggagggagctccccactgctggaggtatgcaagcaccgattggttaagcccctggcagggatcctgtagcagagactggagcgttaagaattggatgacatgacccccaagctctcttcccaccttgaaactctgtggatcttactgtctccctaacaaaggggaggtaagggccagagagtccacatggatggataatctccaaggaagacacagaaacgaagcaagagcatgcttcctggagttggggcagtggggctggtggtctgtagtctggctccctaaggtcctcatcccccgtctcccctcgatagccatcgacatcaactcctcggacatcaaggctctgtatcggcgatgccaggcactggagcacctggggaagctggaccaggccttcaaagacgtgcagcgttgtgccaccctcgagccacggaaccagaacttccaggagatgctgaggagactcaacaccagcattcaggagaaggtgagctgggcctcttcccacaacccttggctgcccagcccctctcttcattcctagtaggaatgggttagggaggtgggtcatcagggcagggctagccctacctccacactctgagatagagacagcaagtggcatgggcaggctgcacagaacagctaagcaggtgcttctatctgtgatgcttgtttgagggcacaagccagccaaggctagaacacaggtcttttaaattccagatggggccaggcacagtggctcatgcttataatcccaatactttgggaggctgaggcgggcagatcacttgaggtcaagtagtttgagaccagcctggacaacatggggaaaccccgtctctactaaaaatacaaaaaatagccggatgtggtgggggcgcctgtaatcccagctactcaagaggctgaggcaggataattgtttgaacctgggaggtggaggttgcagtgagctgagatcatgtgccattgcacttcagcctgggcgacagagcaagactctgtctctcccacccccgccccccccaaaaaaattccagatggaggcttagaaatattattataacttagtatgtctgcaacatgatctctctctctttctatgtattataaaatacatgggaattgaagacatcgatgagggatagaggagagccaggccccattaggagcatgattgctttttttgagacagattcttgctttgttgcccaggctggagtacagtggcatgatctcagctcctcactccaacctctttctcctgggtttaagcaattcttgtgcctcagcctcccaagtacctaggattacagacgtgcaccaccacacctggctaatttttgtatttttccgtacgccacatttcccgcgccccaccgcggggcggggattcggcgctgggctcttccctgttcactcgccattactgagggaatcctggttagtttcttttcctccgctgacaaatatgcttaaattcagcgggtcgccacgtctgatctgaggtcgcgggcctcgatcagaaggacttgggccccacacgagcggcgccggggagtgggtcttccgtacgccacatttcccgcgccccaccgcggggcggggattctaatttttgtatttttgatagagatggggtttcaccatgttggccagactctctcgaactcctggcctcatgtgatccacccacctcagcctcccaaagtgctgggattactgatgtgagccaggagcataaaatattttctaggaaatggagtaggatgcggagaacctggaccagaggtgagaaatcctgaaccctagtcctggctcagctgctagtttttgtggggcatctcttggggtgttggtttcctctctgtaagagccataaggtaattgatcactcagccccttgctccaagactcaataacttctacacatctggagaagccctgtggtaggaccacagcatgctgtccagggtgcagactcaaggactgaggaaatataaactaaggagagattcagagagggataggcgaaggaaagacctctccgcacccccaaaggaaatgagcacaaggctgggtgtggtggctcacgcctgtaatcccagcactttgggaggccaaggcgggaggatcacttgagcccaggagttggagaccagcctgggcaacatagggagagacgctgttcctaccaaaaattaaaaataaattaaaaataggctgggtgcggtggctcacgcctgtaatcccaacactttgggaagccgaggttggtgaatcacctgacatcaggagttcgaaaccagcctggccaacatggtgaaaccccatctctattaaaaataaaaaaattagctgggcgtggtggcacatgcctgtaatcccaactactcagaaggcttagacaggagaatcacttgaacttgggaggcagaggttacagtgagcagagatcgtgccactgcgctccagcctgggtgacagagcaagactgcatctcaaaaaaaaaaattaaaaattaaaaaatgtgctcagaagtaggtgggagtagtgtggacccccccaaacaaagtaacaggaggttcaaaatgagctggcggagtgaaggatgatgatcagttaggtcactttatggaggacccagggcagtggggttggagtggggactgtgagggactagatatccaaacaaaatgagttcaatttgcttgaaacagagcttgaaagctgcttcgtctacatttcaagtgtgttaaaaagaaagaaagctgcttcaggattctgagtatggagacatatttctgttttatccctatttaaatgtctaatagcagattgtttactagactctaaaacttggctgaagatcctttacgccttcccagactattgtgatgtctaaatgggataacaaatgtaaccagatggtgagccttcaggggcaaggacttgattttgttcacaattctattgtatttattaattcatcgtacttatccagtaaatgtttgtcgaatgaatacatgaatgaacgtatgtgcgggagcccagagtagacacctgatatttactgagatgaactgaatgtggagctgaaatgacgtggaccccacctgcctccttccccactccctcctctctcctcagctccgagtgcagttctccacagactcgagggtacagaagatgtttgagatcctcttggatgaaaacagtgaggctgataagcgggaaaaggtgagtgctggccagtgccatccagccagcagaaggacccgccagtctggacagtgacatcattccgagggggaagggggaccggaggcctgtctttgcagcccaggaaggaaaattggccaaaggttaagcacattggaacacagtgtaaaccataagaaggactgagatttgggtgaatctagtgaggagagtcatgcagcaaggttggatcctgtctttatttgaaattttgatgttttgttcatcatggatttttctggcattgattttgatttttaaaaatatagcattgattattattcgattattgagttctttggtgcccctttaaattttgcacccaaggcaagtacctcactggcctcactataatttcggccctaagaaataacgggcccattaaaataacattttatttcattaaaaaatattgaaagaagtcattctgaaaaatttaaatatttaccaacataatcatcctcttaaccaaacttgttaccttttttttttatgtttccttctagtgtttctgcaggggaaaaaaattgaacattcgagtgttttacatttgcaagaacttgagagacaatggggaatttttgttagttttatgttcaataaatccataaactaggcaaatatctttcttaacaaactcttgtgagaacataataagttgttatagataaaataaagttttttggtttgttttttttgtttatttggtttttttttttttggaaaagtacaaagcccttagttgatagtgatggttctggtcacgcttgcctggaattctctaatcagccctctccccagcacccaactcaacatctctttgcccacctcctccccttccccttcttccacctcctgtgtttctcagccctgggttctcaggtcctgcttgagacctggagccttttattttaaggttcatgcatccttaagttggaaggctttaggtgggaagagacttgggaacctgcttgctcaactgcctaaatttacagatgaagagtctggggtccagagaagtgccgtgactcacccaagctcatacagctagcagggagcagaatcagaactcaaacccagggctttcaggtcccatctagtgtttttgctgctcacttcctgggaacttcagattcccctgaacaggaaaatcaacaaaatgtttaaggaaatcattctccatgtaaaaacacttcatttctccaccttttttctagtccttctctgtaagcattatatacatctttattttaacataagtgcaattggagtaaacatttgatcctgattctgcataccaatgctttttccattgctcttagtctttttattcatgactttaatggctgcaatatatttcatccagctggtcttgatgcaaattacttggctttttttcttgaattatgttcttgggctgtgtttccaggaggaggattaccaaggtgagataatagaacaatgttctgaagatccagtctttgcactggctcttcttgtacttggcccatggtccaggcctgggtggccgtacctccctcgtaacccttattgcctcttcctccttcaggctgccaacaatctcattgtcctaggccgtgaggaagcaggggctgagaagatcttccagaacaatggagtagccttgctactgcagcttctggacactaagaagcctgagctggtgctggctgcagtgcggaccctgtcgggcatgtgcagcggccaccaagccagagtaagtgcccggctgtggggcatgtggagcagacgactgctggtccaaggatccggagggtgacgtgtggtcagggctgtggctggcatcaatggaaccagataaaaagtcaaagggtgctccagtctctttttccctttcagttggaaatgggtttcactaagcaaagacaagttactgaaagtgcctaaggcagaagtgatgaatgcaaaggctatgatattttacattttttcatgctaagtctttgaaacccagtgtgtatttcacactacagcatatctccatatggtcctgccaccgtgcaagagctcaacggccccatgtggccggtggtcactgtattggatggcacagctctgacctccagagatgggcatggcttgttgtcaagaggtttccaggacagaggggcccatgaggcaatggctgcctgggctgatttctctactgcatgggatagggtggggaggattatcacaccctctctaacctgcatggcagctagaagggaggggcaaggcagctgaccatggttcttgctggggttctaggccacagtgattctgcatgcagtgcggatagaccgaatctgtagcctcatggccgtggagaatgaggagatgtctctggctgtctgcaacctgctccaagccatcattgactccttgtctggggaggacaagcgggagcatcgagggaaggaggaggccctggttctaggtaggaaacattcttcagttttgattcaaggggatggggaaagaaaaggtcagttgctacctcagactgggaattccctgtatgtgggggtggcttggttttatgtattttcttttcttctctttttttgagatggggtcttactctgtcacccaggctggagtgcagtagcgcgatctagactcactgcaacctcctggattcaagcacttctcctgcctcagcctcccgagtatctgggactacaggcacacaccatcatgcctgcctaatttttgtatttttagtagagacagggtttcttcatgttggccaggctggtctcaaactccagacctcaggtgatctgcctgccttggcttcccaaagtgctaggattacaggcatgagccactacacctggcctgttatatgtattttctgattataaaagtaacaggcatagctgcagtattcacaattgctaaaagatggatacaactcaagcgtctattggtgggtgactggatgagcaaaatatggtatatacatacaatgaaatattagtcagccttgaaaagaaaggaaaatttgacacatgcaacaacgtcaatgaacattaggacattatgctagtgaaataagccagccacaaaaagacaaatactgcatgaatccactcatatgagatacttagagtagtcaaattcatggagatggaaagtagaatagtgtttggcagaggatggaagaggggaaatggcgggttattttctaatggggacaaagtttcagttttgcaagatgaaaaacattctgtggatagattgtggtgatgtttgcacaatgatgtgaatatacttaatgccactgaactgaacacttaaaaatggttaaaatggggccaggtgcagcgactcactcctgtaatcccagcaatttgggaggccgaggtggatggatcatgaggtcaggagttcaagaccagcctgaccaacatggtgaaaacctgtctctattaaaaatacaaaaagtagccgggcatggtggcgcatgcctgtaatcccagctacttgggaggctgaagcagaagaatcgtttgagccggggaggcgaagtttgcagtgagccgagattgcaccactgcactccaacccgggtgacagagtgagactccgtctcaaaaaaaaaaggttaaaatggtaaattttatgtaaattttaccacagcttaaaaaaagtaacagaggcttattgaagacatttgggaaaatatagaactacgtaaaaatgagaataaatgcctataattacccattcaggtaatcactattaccattaccacatggatctttcctctctttttttttaaaccatcaatatttaacaaaattggaattctgctatgaatagttatatgtttttttctgcactgagcattatattaatattgcataccatttaatattctttaaaaggactcctttgattttaataattaattttacatttgtttcctgcatatgcacatacagactcatgcttctccgtgcacatccaggtcctaggcatcaatttagaagatattgctctggctgggagggccaaagaggcaggttcactcagaaaactttattttcaagaatatcataatcttcccttgtatggattattcatcaatcagctctatattattggagattccagttatttccaatttgcatgtttatacaaaactctccaggagccatttttgcatctatgcttgcatttataatttatttttatttatttatatttatttatttatttattgagatggagtcttgctctgttgcccaggctggagtgcggtggcacgatctcagctcattgcaacctccacctcccgggtttaagcgattctcctgcctcagcctctgctaatttttgtatttttagtagagacggggttttaccatgttggccaggctggtgtcaaactcctgagctcaggtgatccgcccgcctctgcctcccaaagtactgggattacaggtgtgagccaccatacctggccacatttataattatttcctggggtcaaattcctagaaaaggagcactgggtcaaaggctatgagaataactaatgttctttctatatcttgctctctaattcctttctgagaggctgcatcaatttatactctcacaagcaatgatgagagtctccattttaacacattctcatcagatctgaatgctatccttcttaaagatatttgcctatccagtagattcaaaattatcgtgttagattcaaactaaattattcatcagattgatcatttttctgtatctttattagccatttggattcctttgtctttggatggtttgttcatgttgttacctatttcttaatgttgttcttatttgtctataagagtttttttttgttgtttgtttgctttgagacagagtcttgtctatcattcaggctggactgtagtaatgcaatcacagctcactgcagcctcaaacttctgggctcaatccttccacctcagcttctggagttactaggactacaggctcgtgccaccatgcctggctaatttttaaatttttcatagggacagggtctcactttcttgcccaggctggtctcaaacccctggcctcaagtgatcctcctgctgtggcctcccaaaatattgggattacaggccactgcgcccagccctgaagtcctggattcttgatgtgactctgacttactattattataatggtcagctagtcactttccttttctgagctagaatttttggaagatccaagatggccctgcttgtgtggctggcagtcaactggaaatgttgaccttgtggccttgtgaccttgttgatcttgtggccttgctagtggccagcttgggtttctatagaacatggtggctggattctaaatggacaagccccaatgtgcaagtgccatgtaagcctctggttgtgccacaggtcacataagcagcccagggccagtgttggaggagattacccaagagcatttataatgagtgtcgtgtttcccagggagacaccaattcacaatcttccatgacttccttgggttgaacatctctgctacaaaattcttccacatattgatttccactctatccccttgtagcttccatctgcctctggtccaaagtctgccctctggagcctcacagaaggagtctgttatctcactctcatgacatgcctctgtctgaagacgaactgtcacatctgcttacatctttccttctttaggcgatggagctgtattccttcatcagttatttatctgacatggtttggagagctttactttttggtttgcctgcctttgggctccatcctagaatgagaacaaaaatctctaagtatcttggagggcaaaatcagaaaaaaaggcatttgccttttaagatctaccagtgggcaggaagtcccggcgtcacaggcaaaagcttgaattcaggctcccagcatgcctgaatctgtggggagtgaaatgtccctaaaaagtacaaattccccttctggaaagcattttattaaatcagtttattagaaaccacataaagcatccctggatctctgccagtcactggtaggagtgaagaactttctaagaatctgaactgctcaaggatggaatgagctgttgtagaagtcagggttcagggtggctggaggaccacttgggggtgttgtctagggatttctctccctttttccaggtgagatgggcaacactatactcccctgggaattcacatattcaggaagtagtggattcagtacttccagagtctagaagctgctgctcttcttggtcatatatatgtgagatttcctacccctctctacttaccccgtcctctttttcttcagacaccaagaaggacctgaagcagatcaccagccacctgctggacatgctagtcagcaagaaggtgtctggccagggcagggatcaggcgctgaacctgctcaataagaatgttcccaggaaggaccttgccattcatgacaactcacgtaccatctatgtggtggataatggtgagaagaggggaaggtttggggcttgctcaagccttttaagtgggcaccagggcactgaacagaaaatggaagatgtgaggctcttgaaggggtcttcagttctaactgaaaagatgagaaaaggcattggcccatcaggatccaccagtgggcctgtgaaggtgcaggtcaaggctctgaattcagagcctgaacatgcccaggaagtgcccaaacacatccccaaaacatgtgggtgaagcaacctagcaaatggggacaaggactccaccaaccacaggataaaattccagaagtctcatggttggtaaaatacttcacaggcctttcaaaagggaggaaattgcatcaagtatagtttatataaagcacagtgagaatgtttgtaaacccaaaagtatctgagacaggtctcaatcaatttagaagtttattttgccaagattacggacatgccccgcagagaggaaacacagaatcacagaaacagtctgtggtctgagcctttctccaaagatgattttaagggcttcaatatttcaaggggaaagacagcctggaggggaaagagggagggtgtggtcacattacatgaatgcacatgttggaagagaaaggaggaggtaggggaatagtcaaatagtcaattacatatttgtctcctgctcagtaaatgatcactttacataagataaggtgaacatagaatggacatatttaagccctagagtaatttattaaacctttggagatatttaaccttttatctgtagctatctgcttaggaataaaaggaaaggcagtttcttgccatgattcagctttcagcttaatttttttcctttggtttagggagttgggggtcccaagatttcatttttgtgtatctatctatttatttctttttagagacagagtctcactctgctgctcatgccagagtgcagtggcgtgatcatagtcactgcaacctcaaactcctgggctacagtgatcttcctacccctcagcctcccgagtagctgggaccacaggcacgaaccatcatgccgggctaatgtttttcttttgtagagatgtggtttcactatgttgcccaggctggtctcaaactcctggattcaagtgatcctcccacctcggcctcccaaagtgctggaattacaggcgcgagccatggcaccgggccaagattttattttcctttcatgtgttctagcagacagtcactcaatttgtcagctccgaggtgttacccctctcctcaatcaacttctttgattgttaaggaatcatacctgtggtttcatgatctgctatggtaaattcttccgtaggttttatgacacacagactataccttgttctaaaagattcagatcagctcttcccagcttaaagaatgtcttttgatattgcacttcccttgtttggtttttatagacctcagcaaagtgcatgtgcaagtgcttagactttaacacattaccctactgctaaatgcccaaaccccacttcctccctgcctcattctggtcttctccacatatgtcatgaaacgtgagcgttaacaacagatcttctctctcagcaccaggatctaggctcatccacgtgttatgggatgggacaggtagagagcagtattttttattctgttctttttgtaaagggcaccaacatggacagcacttgggtaaaaataatgtggatttaaaaattcagatattcgaatacaaagctgcaatgttgaggtgttatgtgttgtgcaaactgggctgggaggcacggtaagggagctgtcaggatgtcaaacccgaagtgagcttttgggtgagagaaggggcaaagatagacaggaggaaggtctagagtgtttgaacagaagagaaatgagatgctcaaggcatgggcaagaatggaaggggagaccgggagatgagattggagaggggcatttgagggatgcttttaggacccaggctggggagtctgtgttggctcatcaggcacttcctgttactccccagccctactgagcactttttaaatgcatgcttgttgcataataagaaatacacatatttggtctctgctgctgtttcctggcacacagctaacctctgaagtgataagtatctttttgtatgctcatgtaataactggtggctgggatcccctagataacctcagaatgtcagaatgggggctggttgccaggggaaacaaccatgcaattacaggattggaactttcggccccccaccccttacctccaggaaggggagaggggctggaggtgggattcatcactaataactaatgatttaatcaaccgtgcctacataatgaagcctctatttaaaaaaaatccctagccaaaggggcttaaagtgctcccaatttggtgaacacatggaggtgctggagggatggctacctggagagggcatggaagtgccacgccccttgccaataccttgccctctgcatctcttccatctggctgttcctgagtttctgtttttgttgttgttgttgtttaaataataaattggtaatctagtaactaaactggttttctgagttctgtgagccattctagcaaattatcaaacctgagggagagggtcatgggaatctctgatttatagttggccagtcagaagcacaggtggcaacttggacttgaggctggcatccgaaggagggtagtcttgtgggattgagcccttaacctgtggagtctgtgctaaccccaagtggttagtgtcagcgttgaattgtaggacacccatccagtgtcagaagtaagctctgagagtaggagtagtttagggaggaaacagaagttttcctttaagtggtaaaatgtacatagcacaaaatttactgccaggcgctttctttttctttttctttcatatgggaagatgggtctgttgcccgggctggtctcaaactcctgggctcaagtggtcctcccacctcggcctaaccaaagtgctggaattacaggcatgagccaccaagccacttccaggcactttttttttttgagacagagttttgcccttgtagccctggctggagtgcaatggcgtgatcttggctcactgaaacctgtacctcctgagttctcctgcctcagtctcccaagcagctgggattacaggtgcccgccaccatgcccagctaatttttttgtatttttagtagaggcggggttttgccatgttggccaggctggttccaggcacttttaattccctcctaacatctagagtttcatgcctcccagcttttacctggaatgttctttctcccacttccctgtactacacaaggtctgaccagctccaagccacctctaaaacctggctccgaaatccatctctctgttgccccagaggcaacatagtataacagctaacatcacaggctttgaaatcagacgggattgggagcgtgtccttgctatgtcactgggcaacttacttgacttgtcctgggcaacttacttgacttctctaagtcttgtttttctcctctgaaagatggaaataatgattcctaaccagcagggttattgttaggattagatgaagtgaatgtgtataaagctcttggcacgtagtaagtgctcagaataaattgcagatcttattttgttgaagtgaatcacctcatcttcagtgttacccttctatacttatcacatctcattgcaatcttcatatgtcagttttccctattgtattgtgagcttttggaggtcagggttgtatctgttattttggtagccagtaccccaaaggtgctcatttatttaacaaagacatgactgttgaatttgcccaacggtaataggaagccattgaagatttttcaacagaagagatgagaagacatcatcatcatcatcataaatgtaaatatggcatttactaaataaatacttaataaatacacactcaataataaacatttattgagtcatagtagtgtgtctggattgatagtagagtttccatacattatctcattgagccctcaaactttatgaggtaggtagtattattcccattttacaaatgaagaagctgaggcttgaggaagggaatatgaaatagtatttggagaagactatacatcagcccatggaatgtcagcactggtagagtcctctgagatcgactagtcctgattttgtacacatgaaaatagaggcccctagagggaggtgaattggtcaagctgggggcagtgtcaggtgtataacctgggtcctttgaccccattctaggccctttcattctggatgaaccacatgttttctacagacagggctggagagaagctgatgataacaagtcactgagtgaggggtgtgtgtgaggatggagcccagcaggaatcttaggcttgccactgtctaccctgcaggtctgaggaagatcctgaaggttgtggggcaggttccagatctgccatcctgcctgcccctgactgacaacacccgcatgctggcctctatcctcatcaacaagctctatgatgacctgcgctgtgacccggagcgcgatcacttccgcaagatctgtgaggaatatatcacgtaagtttcctggaggcctcacagggtcaggctctgtcttggttatctatggctgtgtaacaaattatctcaaaatttagcagctcaaacaatagtgttttattatctcacaccagaacagaaatttgggagtggtttggctgggtggctctggcttatggtctttcatgaagttacagtcatatgctggctggggctgcagccatctggaggcttgactggggctggaaaatgcttccaagatggtggactcacacagctggcacactggtgctggctgttggtgggaggccttggttcctctccctgcagacctctctgcagcctgctgaagcgtcttcactgcatgccgctggcatgccacagtaagagagccaagacagagcaaggcagcagggagatgtcttctctatctagcctcagaagacacatgtcatcacttccgccacattctattcgttagaagcaagtcagtaagtttgacctatgtttaaggggaagaaattaggtttcagcttttgaaggcaggggtgtcaacatatttttggacatattttattttatttattttttgagacagagtctcactctgttccccacgctggagtgcagtgacacaatcatagctcactgcagcctcgaacttttgggctcatgtaatcctcctacctcagcctcccagggtagctgggactacaggcacttgccaccatgctgggctaatttttttttttttctgtcacccgggctggagtgcagtggcatgatcatgactcactgcagcctcagcctgctgggctcaagcgatcctcctgcctctgcctcagcctcccaagtagctgagactataagtgtgcactaccacgcctggctaatttttgtattttttgttttgctatgtttcccaggctggtattgaactcccaagctcaagcaatcttcctgcctctgcctcccaaagtgccgggattacaggcatcaactaccttgcccagccatggacatattttatacctaccactggcttctgtggttgaaaggaacacatgtcagcttgtcaaggagggaggcccggttctttcaagactaagactcatgtggctttgcagagctagacaggggttaggaccctcagcagctgcagttcctgagtctcctcactggtgctccagcatcagtgtgactccagtgcatgaccttttaattctttattgcagtgattcccagacttgtaaattattcagatttctgagacatcccctcttgactcggtagtttggggtgtggctcaggaagctgcatgcttaaaagcactccaggtgagtcttaggtgggtgaagacgttgcctttactctgcttttcctttctatattccaggggtcaacaaactttttctatgaagggccagagagtaaatattttagtatttgtgggacagataagtctctgtcaacatatttttaaaaatcctttaaaatgcaaaaagctggctgggcacagtggctcacgcctgtaatcccagcactttgggatgccgaggagcgcggatcacctgaggtcaggagttcaagaccagcctgaccaacatggtgaaaccccatctctactaaaaataccaaaaattagccgagtatggtggcacatgcctgtaatctcagctactagggaggctgaggcagaagaatcgcttgaacccaggaggtagaggttgtagtgagccaagatcgcaccactgcactccagcctgggtgacagagcaagtctccatctcaaaaagaaaaaagaaaggcaaaaagctgctggccaggtgtggtggctcatgcctgtaatcctagcattttgggaggccgatgtgggagaattgcctgagaccaggagtttgagaccaacccaggcaatgtagagagaccctcatctctaaaaaaaaaaaaaaaaaaaaaaaaattaaaaatgagtcaagtgtggtggcacacccctgtagtctcagctacttgggaagctgaggtaggaggatcacttgagcccaggaggtcaaggctgcaatgagccttgaatgcactactgcactccagcctgggcaagagcgtgagaccccgtctcaaataaaataaaataatgtgaaagctattctcaactccctggatttgccaactccttctctaccccacggcttctgctcaccctgactttggttcacttaggtcttttcaaggcttctgtctttctctacctcagtttcaacttttcctgctgacttcttgagtccctcatgaggtccccaactgactcccattacctgtcatccagctagttcttgtttgggcttgttgattgaggctccctcctgtcagcctgtggaatgctgagaggaggggtcactgccttcatcaaatggtgccccagcctgcccctagcaagagtggaatacatcccgcttcatcaggggcgggggctgtgtggggacccagtgccagctcaaaggtcagaccgcaactaattacgaaggatgctggttccctgggcactgagtggagagatgaggcacaggacatgggatgctcaagctggaggggctgtcagagcttccaaagctgagtcctcttccccaggggaacttgcctgagatcctccagcaatcagaggcagacatgggaccagagcccaggtcttggactcttggtgtggagttctcctgaccagtccacgctgccttcttgcatttatacacagctgcatttccactgtgcacatctgccctgtttcccacaatgcaccaacctgggcagatgagaagcatcagaaggcatgtcacctctgacattcccacgcagagattctcccctagagtagatgataatagattctgaaagcaaggcagaacgttcctggatatctagcccacatgctcaccaacaggggaagggactaagaccagatcaccagaggggagtgactggcccaggccatgtcacagagagacacagtgtgccgggcatcacgctaggcctttttgtgttgttgtcaatgctgtactgtcctcccagacacagcagctgctggaaaggctgtcagctgacagctctcagctgttatctctctttgggacttgtctcacctggggagagctgtttcacccttcccagggaagccagtatgcaaacactcacaccaggctagttgaggtgactcagacctataataccagtgctttgggaggccaggtggaaagatcatctgaggccaggagtttgagatcagcttgggcaacatagcaagatcccatctctacaaaaaaatttaaacaattgtctgagcatgattgtgtgcacctgtagtctcaactgctcaggaggctgaggtgggaggattgcttgagcttaggggtttgaggtcacagtgagctatgatggcaccagtgcactccagcaacagagcaagactcagtctcaaaaaaaaaaaaaagaaagaaaaagactcactctaacttggaacaactgtgaagggtcttccagctccagaacttcttggaggctgaggctttgtgatagctgcaaaatgcctccctctgccccagtcctgcttccttctcttcccaagagctctctctaataaacttcctgcatgtcaatccctgagtcagagtgtatttcccagaggcacactctgtgacacagctgttatgtcatttatcctcaccacaactctgagaactagtagtactatcctcagtttacaggagctgaggctcagagaggttcgctgaattgcccaatatcacacagcacatgagtggtggagccaggatgcaaatccaaatcctactgcctccaaatctcacactctttccactctcttggaccagttctcttgaccacccttgtcctttgttttaggggcaagtttgacccccaggacatggacaagaacttgaatgccatccagacagtgtcagggatcctgcagggcccctttgacctgggcaaccagctgctgggactgaaaggtgtgatggagatgatggtggcactatgtggctcagagcgcgagacggaccagctggtggccgtggaggccctcatccatgcctccacgaagctcagccgcgccaccttcatcatcaccaatggagtgtcactgctcaaacagatctacaagaccaccaaaaatgagaagatcaagatccgcacactggtggtgagtgggctcggtaccaccctcctactcagtacaaggtgccatgccaggcaccagggacaccaaaatgaatgagttgaggctgctgtccttgaggagaccaggttcaagggggcaccagacccagccacagacccctgcagaacagggcaatatccagggggcttgtgaggatgtagattcagaaccgtgaactctgctgcttaaccctgaggacgttcgtctccctgcttatgaacaacatgaacactgaggagcttgtgtccagaatgcattttcagagcaaattctgaagagtcactttccttaatcagtttctataaggtattttttttccactttcattttactttttgtttttttgagatggagtctcactctgtcacctaggctggagtgtagcagcgaaatctcagctcactgcaacctccgcctcccaggttcaggtgactcttgtgcctcagcccccagagtagctggaattacagacgtgtgccaccacactcagctaatttttgtatttttaatagagacggggtttcgccatgttggccaggctggtcctgaactcctgacctcaggtgatccacccccctgggcctcccaaagtgctgggattacaggcgtgagccactgtgcctggcctgaaattattattattattattttttcagacagagtctccctctgtagcccaggctggagtccagtggcatgatattggctcactgcaacccccatgatctcggcttactgcaaccaccgcctcctgggttcaaacgattctcctgcctcagcctcccaagtagctgggattacagatgcctgccaccacaccctgctaatttttgtatttttagtagagatggggttttaccacgttggccaggctggtctcaaactcctggcctaactgatccacccgcctcggccttccaaagtgctgggaggattacaggcgtgagccaccgcacccagcatcaattttttaaaaacaaattctagcttctgacaaaagtgaattttctcttatgaaaccgcccccctaagaaaagtccaattttctctgggtaaaattttgcacatctgaatctgttatccagaagataggatttctctgtcagtttctgtgccgtaacaaggttccccattgaagcttcagatatggttaacttggtcttgctggtttttcaaaatggcaggcacaatacatctgtggggtcaaaatggtgggggaagggggcaggtcaagaatttgcaactttatgggcctctaccctaacccagagcatcagggaaagtatctcagcagaggtgacacctgagctgagttttacagtctgcacagaggtggatccaagcaaagaaagaggggcgaagtgttctggccatagaaacctgtttgagcaaggcttcatccccaagccttggtgtctctgatcctgcatgtgtctgctgtctcctctcctcctcagggactctgtaagctcggctctgcaggtggcacagactacggtctcaggcagtttgcggaagggtcgacagaaaaactggccaaacagtgtcgcaagtaagggggctgtgtttcccaggccctccatctcctcatgcgccttccgggcaagagtctctggggtgtgctctagtggagtgtgaaagggacctcacccctggttcaccaccctgaaatcgcttcaccctcttgacctagccctgggccccttcccatgtgtgctccctcctcacttccaggtggctgtgcaatatgtccatagacactcggacccgacgctgggcagtggagggcctggcctacctcacgctggacgctgatgtgaaggacgactttgtccaggacgtccctgccctgcaggccatgtttgagctggccaaggcaggtgtcggggagtctggcccgaccacaaacctcaggaaaggtctgctgggtccagacccacagggaatggatcccagtcttcctcctggctctactccttacccctgtataaacatgattggttatttccccctttctggccctcattttacctgattgtaaaatggactcccgactcccaatgccttccagagatgggaagatgcacaggagggcagtttgttttcctggggccctcaggaggtgaggtcttgaaggacctgaggcagctaaaaaaaaaaaaaaaaaaaaaaaaagcagggcatcgtagcacgtgcctgtaattccagcacttcaggaggctgaggcgggcggatggcttgagctctggggttcaggaccagcctaggcaacatggtgaaaccccaactctacaaaaaatacaaaaattagctgggcgtggtggcacatacctgtaatcccagctactcgggaggctgaggtgggaggattgcttgagccttgggagatcgaggctgcagtgagctagaattccagctctgcactccagcctgggtgacagagagagaccttgcctcaagaaaataaataaataaaagaggctgtgcctggcctttctgggaacctgccctccctcccaggcccccccagactcctttcctcatctgctgggccaactccctggcccttttctaccagtaaatggaggaagcatgggagagattttcaccaggaccggaaaatgtccagctcccaccccatctccagttggatgggaaagtgttagactgggcttgtggaagaggcgcaaagcgaggatctttgtgggacagctcctattcatactgtcagagctactgtggagggtgcaggagacactgctgcctgcctttatggggagaaccgttcctctcctgcgctgctgtctttcctcagaatgggccctaccagctgcactcctccgacaccaacctgccggccacgtgagggagcatcctggaagcagaggtttgtcctaaagtttcctttctgctttccctctccccaaccctgtgccttccagaccagtgacaagaccatcctgtactcggtggccaccaccctggtgaactgcaccaacagctacgatgtcaaggaggtcatcccagagcttgtccagctcgccaagttctccaagcagcatgtgcccgaggaacaccccaaggtagggtcaggcgcgacccgggaggggtctggtctgtgccactaggcctccaaaggaggcggaacggcaaaaggagtggtgtcaggagtggcacggtgtgtgtttgggtggttgggggtaagatacacatacattgaatatgttaatggtaaactttcccaccagatggtgctcatgctttttctttgtttttattttctattttgaaaaaaatccaacaatttatagtctgagaaaacaaacagagccatgatggacactttgcaatttgtgttgttgattttatggataaaagacagttttatttcatgtctccaacagataacaatttgattttctcagatttctggattttgtgacatgggtgctaagtaggaatcatgagaggagaggcatggtcagcattagcccagaagtcacagatcccctggaaccctctccaacaattccctgcacatgaagatatgatttgtgtgtgatttgtttaagaatatatgcaagatattgccagccaataaaatcatttagatttttttaatgatcaaagtaatataatcatgctgcaaaacgagttaaaatgtggggaaaagaaaataaccactcatgattacgtcatctccacatgactgctgttggcattttgatgttatgttacctaccagaggctttttttctatgtatcttttttcctttcacagttataattagaatatatttatcattttgtgcccaattttggaaaaatatgtttttcacattgccatctcattctctgaatcatttttattttatttatttattttttgagacagagtcttgctctgtcacccaggctggagtgcagtggtgagatctcggctcaatgcaacctctgcctcccaggttcaagtgattctcctgcctcagtctctcaagtagctggaattccaggcatgcaccaccatgcccggctaattttgtgttttcagtagaaacagggtttcaccatattggtcaggctggtctcaaactcctgacctcaagtgacccacccacctcggcctcctaaagcgttgggaatccaggcatgagccaccacacctggcctctgaatcatttttgaaagctgcatgatgtttcatccaggcaagggtgcagagcatgtgctgtggctgtgaagttccagtgtggcttccagggcttgcccagggttgtcagccccttccccaccactcctcactctgaggattatctgtagggactctttaaccctgggttgactttgggtttccagcaaacccaatccattgttatggcggcttcatccactgtgtcctttcctgcctataccctctctctacctccactcccacctcagccttctccaagaaaaacaatatacgcatcatttagtcttttggattatccgtcttttatttcattcctctgtgaatgagagaatctttgggactggttttctacggtatcagctcctcaggctctgtcttgggattaggtaaggcaaggaagaagagaggagagacaatcacacacgacagcaaggcgtgctgtataccccttggcagttgcttgggaagagggaatctggagaagtgtcttagtttcctattgtttctagaacacattgccacacgcactgtggcctaaaacgcaatttttatactttttttttttttttttttgagactgagtctccctctgtcgcccaggcggagtgcagtggtgcaatcttggctcactgcaacctccgcctcttgggctcaagcaattctcctgcttcagcctcctgagtagctgggattatagacacgctccaccatgcccagctaatttttgtatttttagtagagacggggtttcgccatgttgcccaggctggtctcgaactcctgggctcaagtggtccacccacctcagcctcccaaagtgctggaattacaggcgggagccaccacgcctggcccggttttaaaaatcttatagttctggaggtcaagagtcctaaaatgagtctcactcggctaaagtcaaggtgttagcagggctggtttctttgggaggctctaagggagaatcattttgttgcctttttcagcttctagaggccacctacatgctttggctggtgaccttgaaccactctgacctcacttccattccattgttacatctcctagtactaactctgatcttcctgcctccctcttataaagatcctggtgattatattgggcccacacagaaatctaggcttaccccctcatctcaaaatccttaacttaatcgtgtctgcaaaatcccttttgccatgtaaggtcccacgttcacaggttccagagattaggccatggatttttttttttttttttatacagagtctcgctgtgtcgcccaggctggagtgcagtggtgcgatctcggctcactgcaagctctgcccccgggttcatgccattctcctgcctcagcctcctgagcagctgggactacaggtgcccgccaccacgcctggctcattttttgtattttcagtagagacagggttttaccgtgttagccaggatggtcttgatctcctaacctcgtggtccgcccgcctcagcctcccaaagtgctgggattacaggcatgagccactgtgcctggccaggccatggacatctttggaggccattattcaaccaaccccaagaattcagaaatgcaccatctttggttccaataccgattggcctggcacccaggaccctcccacattgccatcttttcatctcctcaggacaagaaggactttatagacatgcgggtgaagcggcttctgaaggcgggtgtcatctctgccctggcttgcatggtgaaagcagatagtgccatcctcactgaccagaccaaggagctgctggccaggtggggctgcagtgggccaaggcttggaactagggctgggggccgagggtcctggagtgcagcacactgggcagggagatagaaatggtgggggcctaaatgaggagataaactattgggaaagcctggagaaaggtctgaggggatcagctttgaaaagtgacatgggaccaggggtggtggctcatgcctgtaatcccagggctttgggaggcccaggtgggaggattgcttgagcccaggaattcaagactagcttgggaaacatattgagaccccatctgtacaaaaaaattttaaattagcctggcacggtggtgtgcacctgtactgccagctacttgggaggctgaggcaggaggatcacttaagcccaggaattcagggctgcagtgaatgatgatggtgctactgcactccagcctgggtaacagagcaagatcctgtctctatacaaaagagaaataaagaaagagagaaagagagagagagagagaaaggaagggatggcggaaggaaaaaaggaaggagggaagggaaaagaagaagggaggaaggagaaagaaagaaaaagaaagaaagaaaaagaaagagaaagaaagaggaagaaaggagggagggaaggaaggagggaagaaagaaaggagggaaggaaggagagagaggaaagaaggaaagaaagaaaggaaagaagaaagaaagaaagaaagaaagaaagagaaagaaagaaaaaagaaaagaaagaaagggaaaggaaaggaaggaaggaaggagaaggaaagaaagagggaaagaaggaaaggaaggaagagaagtggtatgttgggcaggtcatcacaggtggaagtttgtatcaggagaaaggaggccactgttccttcttgttaccttgttctcagagattaaaggcacagtctgtgtgcagcctggccagggaggcaggcaagatcacagctacagtccgatgcaatggatgccatgatgtgggaagcataaagggctgattggagcacaagcagtgttccccaaccagccagactggaggggaggtgggtgggcagctggtaaggcctcctgggggatgtgacaactcaagctctgaaggaagcaaaggagccacctaaatgcaggagagggaaggttccaggcagagagaatagcatctgcaaagacactgaggatggagagagaatgagtgaatttggggttctcctgcaatatgtctggggcagggaatccataggaagagctggtgctggatgagacaaaagaggaagccagagccagatcacggaggacctggggcacatccattgaagttgaaaagcttctcctgggtggttgcatccctaaatagtgatagtggggagtgctctttgcagcctcacttggcctcacttccttcccagccaattattcccatgatgtcatcttcccaaagtggttaattctggggcacaggcacacaagtggcactttccatagtctcccttttcatcccagggtttcactggctccgactggctggcctgctgctgctgctgcctgggaaggtgtgctggtgtattaactgttctcctttcttctcggtcccacagggtattcctggcactgtgtgacaacccaaaggaccgaggcaccattgtggctcaaggtggtggcaaggtaactgggcaggtgccttcctagaaggtgcctttgtgcatgctctttgcctagcgcaagaattatgtaccctctgccccaactcgacctcctggaatacggccaccagttatctgcgctgtctgtgctcatagccccaagccaatttctgcttgactttatgctatgatggtatgtactttggaatcccatctatcctccttgctgttggaaggaagcaccgtgcaaagacagaccctggactttgatgtagaagacttgtagttgagttcttgctcttcccatttctgactgcataacctcaggcaaaatacttaatctcccagccacagcttcttcatctgtaaaatagggggaaaatcacactttcaatttgcagactgtcacaagaattagagaaaatatagaaagtattgattcatggtaggtgctcaatagatgtctgatgttaagattgggtttggctgcaactccgtctctattaaaaatacaaaaattagctgggcctggtggcgtgcacctgtaatctcagctactcaggaacctgaggcaggagacttgcttgaacccaggaggaggaggttgcaatgagccgagatcatgccattgcagtccagcctgggcagcaagagcgaaactctgtctcaaaaaaacaaaacaaaacaaacaaacaaaaggattgagtttggcttgggcagaaagtaaaaaatttgttgattgaattatttatttttccaaaagctgaaggaatatttaggtgggtgggaggaagtggggtaaagacctgaatgtgcactgggaatcaagaggagtgaatatgtgattaaggatttaattgttttccatgatgtgcaagggctgattatacggcagaattttcctggacctcccatgggacagacagacagcacctggagcaggaggataggcgagaagcctctggatgtctgtgactaagtagtgaccttgccctttcttgcaggccctgattcccctggctttggagggcacagatgtgggcaaggtgaaggcagcccacgctctagcaaagatcgctgctgtctccaatccggacattgcttttcctggggagcgggtaggtgcttgggtagatgggatagggcaatgggaggggtctcctttgctcctagaggcctttccccttgtcattctacctcgagcctgggacaggggcatggtgctgtcacacggagggtgatgcatggaggcacctggattccaggcctggttctgcctctgacaaaccggattgccctctccaaaattcagttatcctatctataaagaaaataatcctgcctgtcaggatcattgtgaggatgaaatcagacaatgtatgagaaagtgctttggaaactttacagctggtcacctataaatgtgaggcactcagggaacaaagtcctcacctgaccaaacccttgacccctccccaacaggtgtatgaggtggtgcggccccttgtaagactcttggacacacagagggatgggcttcagaactatgaggctctcctaggcctcaccaacctgtctgggcggagtgacaaactccggtgagtgtggtgagtgtggcaggggtggagagaggtggctcaaaaagtgtttgtttgaaatttcacataatgtgctgagaatgctcttctctgaagacaacacaaaggcaaggggtgggatttgagttagcacaaatccacaaaccacacagtgactataccaaagccaaaaaatgctacaaggcccttctttttcttttcttttttttctttccttttcttttcttttgtcttttcttttctcttctcttctcttttctttcttttcttttctttttttctttcttttctcttttcttttcttatcaagaccgagtcttgctctgtcgcccaggctggagtacagtggcactatctcagctcactgcaccctctgcctccagggctgaagctattttccagcctcagcctctcgagtagctgggactacaggagtacgccaccatacccagctaatttttgtatttttagtagagacagggtttccccatgttggccaagctggtctcaaactcgtgacctcaggtgatctgcccgccttggtctcccaaagtgcttggattacaggtgtgagccaccgcacccagccagcacttctttctacagtagtaatgatcaccattctaactggcgtgagatggtgtctcattgtggttttgatttgcatttctctgataaccagtgatgatgagcattttttcatgtgtctgttggctgcataaatgtcttcttttgagaagtgtctgttcatatcctttgcccactttttgatgcggttgtttttttcttgtaaatttgtttaagttctttgtagattctggatattagccctttttcagatgggtagattgcaaaaattttctcccattctgtaggttgcctgttcattctgatgatagtttcttttgctgtgcagaagctctttagtttaattagatcccatttgtcaattttggcttttgttgccattgcttttggtgttttagtcatgaagtctttgcccatgcctatgtcctgaatggtattgcctaggttttcttctagggtttttatggttttagatcttacatttaagtctttaatccatcttgagttaatttttgtataaggtgtaaggaagggatccagtttcagctttctacatatggctagctagttttcccagcactatttattaaatagggaatcctttcatcatttcttgtttttgtcaggtttgtcaaagatcagatggttgtagatgtgtggtgttatttctgaggcctctgttctgttccattggtctatatatctgttttggtaccagtaccatgctgttttggttactgtagccttgtagtatagtttgaagtcaggtagcgtgatacctgaccctgatgatgcctccagctttgttctttttgcttagggttgtcttggctatgcctgctctttcttggttccatatgaactttaaagtagttttttccaattctgtgaagaaagtcattggtagcttcatgggaatggcattgaatccataaactatcttgggcagtatggccattttcatgatattgattcttccaatccatgagcatggaatgttcttccatttgtttgtgtcctcttttattttgttgagcagtggtttgtagttctccttgaagaggtccttcacatcccttgtaaattggattcctaggtattttattctgttggtagcagttgtgaatgggagttcactcatgatttggctctcaaggatctagaactagaaataacatttgacccagcaatcccattgctgggtatatacccaaaggactataaatcatgctactataaagacacatgcacacgtatgtttattgtggcactattcacaatagcaaagacttggaaccaacccaaatgtccatcaatgatagattggattaagaaaatgtgacacatatgcaccatggaatactatgcagccataaaaaaggatgagttcatgtcctttgcagggacatagatgaaactggaaaccatcattctgagcaaactaccacaaggacagaaaaccaaacaccgcatgttctcactcgtaggtgggagttgaacaatgagaacacatggacacagggcggggaacatcacacaccggggcctgttgggggtggggagctgggggagggataacattaggagaaataccctaatgtaaatgacgagttgatgggcgcagcaagccaacatggcacgcacatgtatacctatgtaacaaacctgcacgttgtgcacatgtaccctagaacttaaagtattaaaaaaaaaaagatatccaggtggatagtgggataaaatgtattcctctttggaagcaggagtatgtcagcatgtactgggttgggattcttttggttgccagtagcagaaaacttaactataataggcctaagcataaaggaaatttattggctcatgtagataaaaagtctggggtaacaagattcaggtgtggcttgatgcagggcttacaaagctgccttaggttcctgttctctctgtctctcctctcctttctgtattgctttaattctcaatgggcttttctgctctctcatggttataagggcagttctggccttcacatcttcttggatctacatccaggatgagagagagagagagagagagagagagagagagagaatttctttactgcaataatacagaggctctccagttgggtgatatccagaacccactgctgtggccaggatgccatgctatacaatttagttgaggcccatggtgcccctcctagagctgggggcagtgtgatgccacataaaccatgctggctgaggatgtgggaaggacagcaccagaatggaagaatggtccctgggtggccagaaaacccctatggtcacggcagaagactcaagggtctttcttcctccaccctcctaccctaggcagaagatctttaaggagagggccttgccagacatcgagaactacatgtttgagaatcatgatcagctgcggcaggcggccaccgagtgcatgtgcaacatggtgctccacaaggaggtgaggcaggggctcaggatggagacccgggcgtgatcaaggcacgagaggcaggccagggtcagggcctggggtgagatcgggagctcttatgatggcattaaggtagcattttgggcagaaaatccaggaatccctaaatatttcctagattatagcccccctccctgtaggggccctgagagaaagatatgcataaaggaaaaaatacaaagctggggctttcaatccagaccctgggctagatgaggtggaaggcaccatttccctaagttacttaggcccaaataaccttaaaacaaagcaggatatgagaccagggcctctcagaggtcaaggaaggctagaccacttgcatttattgaagctccacatatataaaaaaaatgaagaaatgccaaatacagttatcagccattttaggatgtctcaaatgtcagcatttaatgaactaccactgttcccatagaaattgcaatgcaatataactgtactcagcacagaataattacagggtttataaaaataaaatgaattcagaacatgccgtaggcttcatggtccagtcatgggacaaatgatacccatctggtgaatgtcttcttctccccatcctgtcagagtactgctgtgactgtatgtgtaatcttatcagagataacagcagggtctaagtttgaggcccttcattaacatgagggccaagccgaatgtccctcctgggccctcacataggggctagcgtgagacccagtctgtttaccctcaacacctgaaccttagaccttctcactgttataggggaaaacctaacccattaaagccgattaaaggccaggtatggtggctcatgtctgcaatcccaacattttgggaggctgaggtggatgcgtcacttgaagtcaggaattcgagaccagcctggccaacatggcaaaaccctgtctctactaaaagtacaaacattagccaggcatggtggtgggtgcttgtaatcccagctactcgggagcctgagacatgagaatcacttgaacttgggaggcagaggttacagtgagccgagatcatgccactgcactccagcctgggtgacaaagcaagactgcatctcaaaaaaaaaaaaaaaaaagcatattaaagtcagggggaatgaagctaccagggtctaccagggaactggcctaaggctgggctgggggcctggcagccataggggagacagagagtgtgtccaaggagatgggcggggaggctgagaggttgagagaggtaatgggaggagggaggcaacctttcctatgggagcaccggctgctgcaacaacccaagtcaaaatgttcagtggtcccaataggatagaagttcatttcttgctcaccatgtcaaagtcctatttggattgggtggctcacttttttttttttttctgagatggagtctggctctgtcacccagggtagagtgcagtggtgtgatcttagctcactgcaacctccgcctcctgggttcaagcaattgtcctgcctcagcctcccgagtaactgggactacaggcgcgtgccaccacccctggctaatcttttgtatttttagtagagacggggtttcaccatgttagctaggatggtcttgatctcctgacctcgtggtctgcctgccttggcctcccaaagtgctgggattacaggcgtgagccaccgcgcccggccgggtggctcactttcaagctgactcagggatccaggcttctttgatcatcaagaactgtcttctcctctgccacactgggagtggattccattctgatggtgaatggggagacagactgagggagaggtgcctgaaagtgacacatcacttccactcatgttccatctatgagaactaggccaccaccacatcgagatgtgagaaatgggggaatgtagtccatgtaagggcagctgtgtcccatgagagggggccatgctgacccctctgatatatggtgacctctgccatgctctcacctcccatgaccactgctccagcttcagggagatgcaggtagagggtcacatctgggaagctgtgatcttggtccccttttggagttccacttctaggaaacctggcccagtagaatgcgctgagacttgaccacctagattttacagtagtgcagaggggtgaggatgagatgctgtgaggggttaatacctctctgagacatatcagggcactggtcccctggaagctcttctcctggttttcagatcgttgggaagcctcatctctcacctggtggagacggcactgtagctttctaataccaagcaaaccacataattgttccctgcttctgccccagtccctgcaaaatcattttatggaagaccctgaaggcccatccattatgggagaaaccttccaatgttccccaaagggatgggaaatacagttcctcaggcatcatctaccctgcaggagtctgtgcctgcctccttcccctggtgtggaggctgaatgcaaacagaggtggtgaagcacactagatggggaattccttattttctttacttggaagaatttgtagccccttcattcaaccagtcagggaaggcttcttgggggaggtagcatgagtgacctgctcaaagggaaactctaagagatcttgggtcagagaacttcagatgtatctttccctcttcaggctgggcagattggggacagttttctctgagccatgttcctgcctcccacaggtacaggaaaggttcttggctgacgggaatgaccggctgaagctggtggtgctgctctgcggggaggatgatgataaggtgcagaatgcggctgcaggggctctggccatgctgacagcagcacacaagaaactgtgcctcaagatgactcaagtggtaagagctggccctggggataggacgggctgggtggctccagggaatctccccacccacagaccacactggatgatcctctggggaggccaactcctaaagaaacccctcgcagcccccaggcttctgttcctactgcctaaggagaggagggtttattcacttcagtgccttacattcattatttggtcttcccaagtgtgctagctcaaaccctcccactggagtttcacccattacctttagtggtgcatatacctcattgcttaagaacaatagcaatgctaaccactgccatggagctccagagcttcccaagagaagcacggatgtggttgggatgccataaggagcttatggtttggcaaaaaagctgcagattctcttaagtgggcacaatgaccagctcctatgagactgtggccattgcagcaggtgtaatggaaatgatatctgtatagtcacaaacgtgggagtgcacaatgaaactttccttatttcaccaaactgaagagtttgtgggcactcatctctccccatggtgaaaaatgtggacatctcaattcaaaggtgttcatgtctgttttaaaggcaggctcttctagatagtcagtgtaaggtatgtgtgtatcagcgggtgtgttctctaagttccaaggggggttacgttgtcctggcatctggcaagggtgtatctgctgaatgtagctcatcctgcatggtctttggacttcagcttctttctctaaggcaagcttctcaaaactgtaatgtgtgtaagaatcacctgggcaacttgttagaacagtttcccaacgtgttctgatttagtagattgggggtgggaggctaacagcttggagaccacactttgaaaccgctgccctagagcagcctctgctggtgtcactggtcacataactcttgttgcaggtcctcacaggaccctctgtgactccttgcacttactgagtgccaggtgttgccctaagtgtttacatttattaagtcatttaattctcccaaccaccgtgtgaggtggatattattattgtcatcatccctattttacaaatgaggaaactgaggtgcagaaaagcaactagcccaaggccacgcaggctgttagttgggaagggattgggacccttcaggattgccaacccactcctggccactttgtcggtcttccttgcggggctcagacatcttggctgcatttttgttctgacatggggcttcctggggactctgtgaagctgctcagactcatcttttgtgccaccccatggccatgttggatgctggacatctctacagtctcatgtcatctgggctatgccctgggctatgcttcctgctctggaatcctatccttgttgagtttctatcactgcttcctttgaccttcggtgactcatcccagggagcgatgggccctggacccattatcagttacacttcagcgtagaaactttccagcatagaaccgtgccacagctagctgagctttcatgttctttccttgggataggacattcagtgcagtttacaaaagttgggttagatgctcaaaagccaagaatttgccttttcttccccccgtgtctgtctacccatgtgcttgtggaaagtgagccctgctgacaaatgccaggtgagggtaacaggtacaaagaagcccaagggaaaacctttgcattggtgtttttttttaatttatttttatttttatttttttttgagacacagtcttgctcttttgcccaggctggagtgcagtggtacaatcttggctcactgcaacttccacctcctgggttcaagcgattctcctgcctcagccttcctagtggctgggattacaggcgtgcaccaccatgcctggctaatttttgtatttttagtagagagggggtttccccatgttggccaggctggtctcaaactcctgacctcatgctccgcctgcctcggcctcccaaagtgctgggattacaggcatgagccaccgcacctggcctgggttggtgtcttaaatcatcacgtacttgccctgcatccacttctacttgttgagcacttactgtgctccagcctccatactaagctctttccatgtatcatctcattaaatcaccacaatgttagaggaaggtatagaagatgaccctgaggcttacagaggttaaataacttagctgaggccatatggttggtagcgtgaccataactaagttatgctgattcctttagtccttttgtttttgttcattttctgttgctataacagaatacctcagactaggtaaaagaaaagagcttcattttggttcacagctcaggagggtgggaagtccaagatgagacagtgtcatctgatttgcttttggtgaaggtcttgtgctgtgtcatagcatgatttagaagcagaaggggaagtgtgtgtgtgtgaaaaggataaaacacaagaggtggcaattggggccgtgagtggctctcatgattactagtctagtcccttgagagcaagaactcactgctgcaagaattaacacattcctgtgacagcaacattaattcctcttaatgacctaattacctcttaaaggacccacctcctaacattgccacaccagggaccacatttccaacacatgaactctggggacacactcaaacctagcaccttccttacctttttccctgcctccagacaacccagtggttggagatcctccagcggctttgcctgcacgaccagctgtctgtccaacaccggggcctggtcattgcctacaacctactggcagccgatgctgagctggccaagaagctggtggagagtgagctgctggagatcctgactgtggtgggcaaacaggagccagatgagaagaaggcagaagtggttcagacagcccgagaatgtctcatcaagtgcatggattatggtttcattaaaccagtgtcttagacagcgaccctcagggatgctgggagtggtcctgtactgtgcagagtcctgggttggttgggttctcctgaagagtcaggtcatctagggatcatagcagtgacaatgaagtctcaatataaaggaaagacttgattgttctctgagttgtgagtcttctcctttgtcctgacagagtttggatgtttcactctctctcttgcttcctgtctccttatatttgtcatgtttcagaaattcccagaataattttcacccatgattagaaataggttggatcattctttctgtacccattctgaaggccaggataataggttgaagttctttatattttggaaaatggattttgtggtaaggtaggaactaacgggtgtgtgcatataaaggttaatgctgttgtatttggatgctgatctgtgctgttttcatgacctctctcccacactatttgaatcagtctgttcagaactgtgtgtttcacctgcagtgctctgtcccagtcccatgcccattcccatcacttcactgtgatggaaatagagtttatgttcaacagtggggcatgacctctgcaatttgcttgggaaagtcttccaagcaagatggacatgatgaatacaaataagatctactcaaagtacttcaaacaaaaaataaataattcattggctcatgtatcttggccacccagggaaggtctgacattgttagttagatccagagtttcaaatgtcatcaccatggatgtgtctttttctctctctcatttcccctccccatatcttgtcttttatttattataggtttgtctcattccctggcaggctctctccctgtgataggaaagagagtccccagcagccccagggtgacatagttgttatagttcattatggaatagaagagagaagagcattctcaataacccggcaaagttcccagggatgactctgatatgtctatgtctcaggtcacatttccatctatgaaccaatcatattcagaggtggaatgctaattggccaggcctgggtcatatatacaagtctagggaagaaatgagcttcatccctgtccaattgacatggactgattaggggtattaatggaagaggtgtgccaccacaaaagaatgtaccctgggcagatcaaagaacatattctgtatgtcaggcttggccacaaaagaatgacacaagtaatatgctgtagatcagaacctctctgctaatattgcctttttagcatggttaagatagctaagatctagtactgtcactccagtatgtcccaattctacctacgtttattgaagggtcaacagttctgatctcagcattgggtaaagggtgggacattcagatttacggtccttgataaaaacaatttacaacgttccgttgtgtaataaatgtaagtgtacatatgcctgggacatcagctggaaaagggacagactatcagagagttgcactgttgcggtatgggccaaatccaacataatacccgctgtacctctagagaactaaaaccttaatttctcagatcttttctgcactaatggtctttacatacagcctacattttaactaactcttgcatgggcttgtttcacagcaggaaactatattcatcatatccttattatgatagagaatgacaacattcaaaagggtgtggtgcttctgaaaatatacacaataaatggcatgatttgacctctgtcaaattcttctttcctgctttcctcatatgtgggcttgagtgggtgtatttagctcctttaaaggaaactctttcacaggcagggccacactcttactcgttttgatctcatgaggttacatctgccagtggcgttcagggccagttagataaagttcatcttgtttggattggagagactttttttttttttttttttgagacagggtcttgctctgtaacctaggctcaagtgcagtgcagtggtgcagtcatggctcaccgcagccttggtctcctgggctcaagtgatctttctacttcagcctcctcaatagctgggactacaggcacacaccaccacccccaggtaattaaaaaatttttttttgtagagacagggtctcactatgttgcccagtctgggagaccacattctttaacatgaatattttgtaaatagtccaagaagatctagaggaaagctgaattccttcatctgatttttgccactgggctgcctcccattgtctggctaagtcttcatgggaggcctttaagaaaagctgtgacaaatacctttgtttcccactgcctaggttacataagtagttggcttttccagcctagactcttatattgttgcttgtaagagggcccttctttgcagatttcttttttttttcatctatgctttcaaataggcagatgctagcctgagatcatctctttattgaggtagtttgcccaaaaacagcaaggaacagccaatacctgccaactttctaggtttttccaaccaattctcttacagaaaatctataaatatcttagaggtatgtttcttagtttcccaacatataatgggaaaattcatcatttatattattacttttaactgaagtatgttgttatcagagaacttggtctgtgtcatattaatcctttgccatttgagaagcatacagttttaaagtttatatctccaaaaggatattttgtaaaaatttaacccctttgactcttagtcttctcatttgtgaaaggtaaataataaagaatttctgttcctagtaagagtaacttgtggcaaaacaataccatgacatacaaaaattgaaaaactgggcaaaacttaaacaatctgtttaaggcaccgagagccattaaggcagtgagaccaacaaaaagggaagcaccaaggaggaagcttaactttttggtaaagttgattccatttgggatgtttgccaatttgttagcagaggttgtgagtcacagaggtttaagtgtctgagacaccatttactaaactgttaaaagaagaaatagaaaatttgaatagtatgatacctattggagaaattacgtttgtaataacaacaacgatggtaaggaaagccttcccacaaagaaaactcaggcccatttagtttcactggtgaattctacaggcatttaagaaagaaacaatgccattcttttgttttcttttgtttttcgagacagggtctcactctgtcacccaggctggagtgcagtggcgtgatcacggctcactgcagcttcaacctcctgggctcaagcgatcctcccactcagtctcctgagtagctgatattcactgttagtcctccaacttaatgtttttttcttttcctttttaaaaactttttttttatatagaaatggagattcactatgatattataggtgcatcaagtatttttattttttattttttgtaaagaccaggctggtcttgaactcctgggctcaaataatcctctcacctcagcctcgcaaagcgttgggattacaggtgtgtgccaccgcgtctggccaaaacagtaccagtcttatgcaaacccttccaaagaagataaaagaaaggacactttcagctctttttatgaggatagcttgatagcaaaacttaacaaagacatataggaaaattgtagaccagtatcttttatgactataggtacaaaatcctttactaaatactagcaccccaaatccaccaatatataaaaagataacacattaatcaagttatgtttattctaagaacaataagttggttaatatgagactatcaaccaatataatgtactacatcaacagaataaagaataaaataatgactatctcaatagacgtaagaaaagtttttgataaaattcagtaacaattcatgataaaactcttcagtaaactaaaaatagaaagaagcttccttaatgtgataaagtttatctgtataaaatctatagccactgtgatatttaattatcccgagattaagaatgagataacagtacttgctattaccaattgtattcaactttgtaccgaagagcgtagctagtacaaaaaggcaagaaaaggcaatgaaaatcataaaattggccaaacgtgacagctgttacaatggcaggttacaggttagccaagcgggaggcagacatgtgtttcaggggaggggaaggctatttccaccatatgcaagtggatgctgcattggacactgatgggcagaaccatcatgctggaaaataattttttattttcatgacagcctaccattgaatttacaattctgatattaatgaaatatctctataaagggttgaagtgtcttcctgcaacaattgccaaggaacaaaattgtcaatttattaatgaaacatgacgtgtgttgaacaagacaagctgggtcaagcatttgaggatgcttttgaggcactgaggcaacattcaactggagatctttagtactcgccagattacaaaaattacctggctttaatcaattattgtcctcacgtcaaaggaaattccagctgctatggagtgttgcctacagaggaacctctctgtaattggagaacggtaatcaacagtgctgcggacttctattttgaaggaaacattcatcagtctctgcagaacataactgaaaaccagctggtacaacccactattctccagcaaaagtggggaaaaggcaggaagaagcttagactgtttgaataccttcacgaatccctgtgtaatccggagatggcaccttgtattcagtgggtagataaaatcaaaggcatctttccgtttgtatcaaaaaacaaaggaaaacttgccgagctttggcggaaaagaaaaggccgttggaagaccatgacttatcagaaaatggccagggcactgagaaattatggaagaagtgaggaaattaccaaaatccggaggaagctgacttaccagttcagttaggccactctccaaagactctctccatcttatttcttggggaaagagatctttccccaagtgtgttaaacctgatcaggaatatctcagtttaaataactggaatgcaaattataattatacatatgccaattaccatgagctaaatcaccatgattgctaaatatactctcatatttcatggtttcctggcattggaagtccctacagttttaaggatttctcactctctgtctcttttttccttcctctgaaggagtttaggatttttctcttaaagcaaacactaaagagaaaaaaaaccaagtaactttatttgctgcttttatcaaagagcatgtaatctatactaactcagtgggaaattctgccaatgagcagctttttttttaatactctatgaagattcaatgaaaaactttattgtttcaaatgattaagtccatttgaaactatagactaaatgtccttgctctgctcttactattctctctaatttttttattttattattttttaaaagaggtctcagccaagacaattttaaatttttatggatttaggagtacaagtgcagttttgttgcatggatacattgcgtagtggtaaagcatattgcatagcatcctcatcatcagaatagtgaacattgtacccaataggtaggatttcatccctcatcccccacccatctgcccaccttttggagcctccggtgtctattactccactctgtatgtccattgctaagcccccaactatactcattttattttattttaaaacttgttttctttttctgcatacttcaatggatgcaaactcttttcattttttcttttcctttcacagacagtgacttcattttttttttttttttttgctgctaactcccaagcacaacacagtgacttatgtttttaatttttttaagaggcaaagcctacctctgaagctccttttttttttcttttcctacttcaataagctggtctacattcttactcttctctatgcaaccactttcttctagattaacagtgctagtacagatgatttgatttatacattgatttcagcattttcttttcatgtactcaggtgaggaaaatcactcttttatatccaatgactttacaaaaaatcatttacaaagaagtgactgcatatgataaaatatttgtgccaaaataaattcatggcttttaaaatgtcatagaaatgtctattcaggtatctttttttttttttttcacattcactgtaatccttgtttgatgtcaatgtcacgtcaccaccccaagcggggggcacaagcacgaggaaaggaaaccttccccgtgaggggaggggtggggaggcacgcttccctcccccagcgcagctgctggctctgtctttgccggaacactccagccccaatgctcttctctttgctgctgagtgaagtcctccccatggcccacggcctccctgcctcagccctttggatctgctcctcagactttaccccttagttatgccctgattctaggacccagcctggactccacatcccttggtcccaggctggccccaggtcttccacgtagtccctctccaccaagtccccaagtcacccttgactctgagaggtatccctctcccacaccagttcttttccagtcacttctcctcccatgtttgtcttcagtctttgcctttatttatccctgtccctcccaacccccgggctcccaagttctatctcactcctccaccctccctgtcctctcacagctgaggttctgggctgtaatgatggcaatgctgcccagcacaacccctgccgccacgatgtcagaaggtgccacagtctcatggagcatataatactgcagtataagggccacaaccacctcggaatgtaggacagcgcacaccagggcagggtgggccttggtgaccgcatagcccacacatgtgaaggagaccaaggcgaggatccccactgcccccacacaactccaactcaggaggtcactgggcaacacgggggcctgcagcacaaagaggcctggcacagagcccagcagccccaccaagccagataggaaggccactgttgggaggcaggggggaaagtgcagagaacgatagaccagaagcctcagggacagcgccaggcctcccaggaaagcctccacatagcccagggcggtgtagacacccgtggtcccctcctgtagtgtccagagtccaggtcccacaatgatgattagtcctaggatgcagcccaacagtccacaccagtcgtagccactgagaccctggctctcaaggcagagagtgaggacggcggagcagacggtggaagaacctttgcgaacagtggcagcgttgccagcgggcaccacctgaaccgcactgtaggcacatccaatgctgaggatgttgagcagggcacagaagaaggcccggcttcggatgtcaggagttcccagaagggggtcgccacgcagtttaagtagcagggcaatagggaggtggaagaggcatcgccagatgagcagctccagcgagggcaggttggaagcctggtaagccatacgagaaagggggcccacgaagccagcaggcaggcccccacccagcagggccaccagcaggccactggtggcatcagagggctggcagcgctggtaccagcggaggctgggtggagcggagggcggcgatgggtgtgtggagtcaggctggttgaaataggggtgactgccagccatctttccttggactttctcctctcctcctggctcagggagcctgggcccctcagagctccagccattgtgacctcattggagtgggggtgggattcttccctggaactctcctgaggtggtagcacgcctattttcccactgagtccaactctgcttcttttctttctttttttgttttttgtttttttttattgatcattcttgggtgtttctcgcagagggggatttggcagggtcataggacaatagtggagggaaggtcagcagataaacaagtgaacaaaggtctctggttttcctaggcagaggaccctgcggccttctgcagtgtttgtgtccctgggtacttgagattagggagtggtgatgactcttaacgagcatgctgccttcaagcatctgtttaacaaagcacatcttgcaccgcccttaatccatttaaccctgagtggacacagcacatgccccagagagcacagggctgggggcaaggtcacagatcaacagcatcccaaggcagaagaacccttcccagtacagaacaaaatgaagtctcccatgtctacttctttctacacagacacagcaacaatctgatttctctatcttttccccacctttcccccttttctattccacaaaaccaccaccgtcatcatggcccgttctcaatgagctgttgggtacacctcccagacggggtggtggccgggcagaggggctcctcacttcccagaaggggcggccgggcagcggtgccccccacctcccggacggggcagcggccgggcgggggctgaccccccacctccctcccagacggggcagcttgcccggcgggggctgccccccacctccctcctggacggggcggctgccgggcagagaagctcctcacttcccagacggggcggctgccgggtggaggggctcctcacttctcagacggggcggctgccgggcggaggggctcctcacttctcagatggggcagctgcggggcggaggggctcctcacttctcagatggggcggccgggcagagacgctcctcacctcccagatggggtcgcggccaggcagaggcgctccccacatctcagacgatgggcccccgggcagagacgctcctcacttcctagacgggatggcggccgggaagaggcgctcctcacttcctagatgggatggcggccgggaagaggcgctcctcacttcccagactgggcagccgggcagaggggctcctcacatcccagacaatgggcggccaggcggagacgctcctcacttcccaggcggggtggcggctgggcagaggctgcaatctcggcactttgggaggccaaggcaggcggctgggaggtggaggttgtagctagccgagatcacgccactgctctccagcctgggcaacattgagcactgagtgaatgagactccgtctgcaatcccggcacctcgggaggccgaggttggcagatcactcgtggttaggagctggagaccagcctggccaacacagcgaaaccccgtctccaccaaaaaaatacgaaaaccagtcaggcgtggcggtgcgcacctgcaatcgcaggctgaggcaggagaatcaggcagggaggttgcagtgagccgagatggcagcagtacagtccagcttcggctccgcatcagagggagaccgtggaaagacagggaaacggagaccgtggggagagggagagggagagggagagctcaggtatcttatacattgttttctttccttctcttcttttgatcttacccacttttttttacaacttaaagcttttttttttttttttttttttgagacagggtctcgctctctcacccaggctcaagtgcagtgacacaaacatggctcaagcccagctaattttttttttttttttgtagagacagtgttttattatgttgcccaggctagtcttgaactcctgggctcaggcaatctgcccaccttggccttcgaaagtgctgggattacaggtgtgagtgaccagactggtcccaaaacttttttaatgtttaaattttaccactatactaaggaggagttacccatcttttaattgcctttttttcttcttattagggaggggtaaggaagaagacttggtcagcagaaagcaggtcttaattgcttttttgttttgttttgttgctattgagttgtttgagctctttatatgtgttggatattaaccccttatcagatgtctggcttgcaaatattttctcccattccataggttatctctttactctgttgattgtttgctgtgcagaaggtttttagtttgtttgttttagctacacatcatgaaccaagaagctttttactttgatatgataccatttgtctatatttaattttgttgtctgtgcttttgggaacaaatccaaaaaatcattacccagaccaatgtcttgtatgtttcccctatgttttctttcttttttttttttttttttaaaggaggctgtcagctgatcccctatgttttcttctagcagttttaggttcttggtcttaaaggtctcttttttttctttctttcctttttttttttttttttttttttttgttggcaattttcctgagcaaactaatgcaggaatgtttaagtatgtaatccattttgaactaacttttgtatatggtgttgaaataagggtccaattttctttttctgcatgtggaaattcagttttccctacaccatttattgaaaaaagcggtctttttcttcttggcatatttgttgaaaatcagattcatctctgggctttctattctgttccattggttgatgtgtctttttcttttttgccaattccatgctgttttacacttacttgatcttagccaaaaggcagagaagcgattatttcatactattttaattagtatagctttgtagtatagtttaaaatcagatagtgtgatacctccagttttttcaacttcagagagctctgaagcaaatatctccagctttttttctttttgctcacgattgccttggctttttttttttttttttttttgcagttttgtatgaattttaatgttttttgtttttttttgaggcatggtttcattctctttcccaggctggaatgaatgtcacaatcatggctcactgcagcctcaaactcctgagcccaaacaagcaatcctcctacctcagctcctggagtagctggtacctcaggcatgcattgacaaacctggtaaaaaaatttttttttttttggtagaggtgaactcctcggctcaagcagttcttccaccttggcctcccaaagtgccaggattacaggctagaatttttttctatttctataagaaatgatgttgggattttctttttctttctttctttcttttttttttttttactataagttttagggtacatgtgcaaaatgtgcaggtttgttacatatgtatacatgtgccatgttggtgtgctgcagccattaactcgtcatttaacattaggtatatctccatgctatccctcccccctccccccaccccacaacaggccccggtgtgtgatgttccccttcctgtgtccatgtgttctcattgttcaattcccacctatgagtgagaacatgcagtgttcggttttttgtccttgcaatagtttgctgagaatgatggtttccagcttcatccatgtccctacagaggacatgaactcatcattttttatggctgcatagtactacatggtgtatatgtgacacattttcttaatccagtctatcattgttggatatttgggttagttccaagtctttgctattgtgaatagtgccacaataagcatacatgtgcatgtgtctttatagcagcattatgtataatcctttgggtatattaccagtaatgggatggctgggtcaaatggtatttctagttctagatccctgaggaatcgccacactgacttccacaatggttgaactagtttacagtcccaccaacagtgtaaaagtgttcctatttttccacatcctctccagcacctgtcgtttcctgactttttaatgatcgccattctaactggtgtgagatgatatctcattgtggttttgatttgcatttctctgatggccagtgatgatgagcattttttcatgtatcttttggctgcataaatgtcttcttttgagaagtgtctgttcatatccttcacccacttgttgatggggttgtttgtttttgtcttgtaaatttgtttgagttcattatagattctggatattagccctttgtcagatgggtagattgcaaaaattttctcccattctgtaggttgcctgttcactctgatggtagtttcttttgctgtgcagaagctctttagtttaattagatcccatttgtcaattttggcttttgttgccattgcttttggtgttttagacaaaagtccttgcccatgcctatgtcctgaatggtattgcctaggttttcttctagggtttttatggttttaggtctaacatttaagtctttaatccatcttgaattaatttttgtataaggtgtaaggaagggatccagtttcagctttctacatatggctagccagttttcccagcaccattgattaaatagggaatactttccccatttcttgtttttgtcaggttcgtcaaagatcagatagttgtagatatgtggcattatttctgagggctctgttctgttccattggtctatatctctgttttggtacaagtaccatgctgttttggttactgtagccttgtagtatagtttgaagtcaggtagtgtgatgcctccagctttgttcttttggcttaggatttacttggcaatgcgggctcttttttggttccatatgtgttgcgggaagtcaggggccccaaatggagggaccggctgaagccatggcagaacgtggattgtgaagatttcatggacatttattagttccccaaattaatacttttataatttcctatgcctgtctttactgcaatctctgaacataaaattgtgaagatttcatggacaattatcacttccccaatcaatacccttgtgatttcctatgcctgtctttactttagtctcttaatcctgtcatctggtaagccgaggaggatgtatgttgcctcaggatcctgtgataattgcgttaactgcacaaattgtggagcatgtgtgtttaaacaatatgaaatctgggcaccttgataaaagaacaggataacagcaatgtttaggaaacaagagagataaccttaaactctgaccgccagtgagccgggcggaacagagccatatttctcttctttcaaaagcaaatgggagaaatattgctgaattctttttctcagcaaggaacatccctgggaaagagaatatgtgcctggggttgggtctatagatggcccccttgggtgtggccatcttctatggtcaaaactgtaggggtgaaataaaccccagtctcccatagcgctcctaggcttattaggaagaggaaattcccacctaataaatttcggttagaccggttgctctcaaaaccctgtctcctgataagaggttatcaatggcaatggtgcccgaaacttcattagcaattttaattttgccctggtcctgtggtcctgtgatcttgccctgcctccatttgccttgtgatattctattaccttgtgaagtatgtgatctctgtgacccacacctattcgtacactccctccccttttgaaagtccctaataaaaacttgctggttttgcggcttgtggggcatcatggaacctaccgacataagatgtctcccccggatgcccagctttaaaatttctctcttttgtattctgtccctttatttctcaacccggccaacgcttagggaaaatagaaaagaacctatgtgactatcggggcaggttccccgacacatatgaactttaaagtagttttttccaattctgtgaagaaagtcattggtagcttgatggggatggcattgaatctgtaaattaccttgggcagtatggccattttcatgatattgattcttcctacccatgagcatgaaatgttcttccatttgtttgtatcctcttttatttccttgagcagtggtttgccttgagcagtggtttgtagttctccttgaagaggtccttcacatcccttgtaagttggattcctaggtattttattctttttgaagcaattgtgaatgggagttcactcatgatttggctctctgtttgtctgttattggtgtataagaatgcttgtgatttttgcacattgattttgtatcctgagactttgctaaagttgcctatcagcttaaggagattttgggctgagacgatggggttttctagatatacaatcatgtcatctgcaaacagggacaatttgacttcctcttttcctaattgaataccctttatttccttctcttgcctgattgccctgaccagaacttacaacactatgttgaataggagtggtgagagaggacatccctgtcttgtgccagttttcaaaaggaatgcttccagtttttgcccattcagtatgatattggctgtgggtttgtcatagatagctcttattattttgagatacgtcccatcaatacctaatttatcgagagtttttagcatgaagggttgttgaattttgtcaaaggccttttctgcatctattgagataatcgtggtttttgtcgttggttctgtttatatgctggattatgtttattgatatgcatatgttcaaccagccttgcatcccagggatgaagaccacttgatcatgatggataagctttttgatgtgctgctggattcggtttgccagtattttattgaggattttcacatcgatgttcatcagggatattggtctaaaactctctttttttgctgtgtctctgccaggctttggtatcaggatgatgctggcctcataaaatgagttagggaggattccctctttttctattgattggaatagtttcagaaggaatggtaccagctctgccttgtacctctggtagaattcggctgtgaatccacctagtcctggactttttttggttggtaagctattaattattgccttagtttcagagcctgttattggtctattcagagattctacttcttcctggtttatcttgggagggtgtatgcatcaaggaatttgtccatttcttctagattttctagtttatttgcatagaggtgtttataatattctctgatggtagtttgtatttctgtgggatcggtggtgatatcccctttatcattttttattgcatctatttgattcttctctcttttcttctttattagtcttgctagtggtctatcaattgtgttgatcttttcaaaaaaccagctcctggattcattgattttttgaagggttttttgtgtctgtatttccttcagttctgctctgatcttagttatttcttgccttctgctagcttttgaatgtgtttgctcttgcttctctagctcttttaattgtgatgttagggtgtcaattttagatctttcctgcttcctcttgtgggcatttagtgctataaatttccctccacacacagctttgaatgtgtcccagagattctggtatgttgtgtctttgttctcgttggtttcaaagaacatctttatttctgtcttcattttgttgtgtacccagtagtcattcaggagcaggttgttcagtttccatgtagttgagcggttttgagtgagtttcttaatcctgagttctagtttgattgcactgtggtctgagagacagtttgttataatttcttttcttttacatttgctgaggagtgctttacttccaactatgtggtcaattttggaataggtgtggtgtggtgctgaaaagaaagtatattctgttgatttggggtggagagttctgtagatgtctattagctctgcttggtgcagagctgagttcaattcctggatattcttgttaactttctgtgtcattgatctgtctaatgttgacagtggggtgttaaagtctcccattattattgtgtgggagtctaagtctctttgtaggtctctaaggacttgctttatgaatctgggtgctcctgtattgggtgcatgtatatttaggataattagctcttcttgttgaattgatccctttaccattatgtaatggccttctttgtctcttttgatctttgttggtttaaagtctgttttatcagagactaggattacaaccctgcctttttttgctttccatttgcttggtagatcttgctccatccctttattttgagcctatgtgtgtctctgcacatgagatgggtctcctgaatacagcacactgatgggtcttgactctttgtccaatttgccagtctgtgtcttttaattggagcatttagcccatttacatttaaggttaatattgttatgtgtgaatttgatcctgtcattatgatgttagctggtgattttgctcgttagttgatgcagtttcttcctagccttgatggtctttacaatttggcatgtttttgcagtggctggtgccggttgttcctttccatgtttagtgcttccttcaggagctcttgtagggcaggcctggtggtgacaaaatctctcagcatttgcttctctgtaaagtattttatttctccttcacttatgaagcttagtttgcctggatatgaaattctgggttgaaaattcttttctttaagaatgttgaatattggcccccactctcttctggcttgtagaatttctgctgagagatcagctgttagtctgttgggcttccccttgtgggtaatccgacctttctctctggctgcccttaacattttttccttcatttcaactttggtgaatctgacaattatgtgtcttggagttgctcttctcgaggagtatctttgtggcattctctgtatttcctgaatctgaatattggcctgccttgctagattggggaagttctcctggataatatcctgcagagtgttttccaacttggttccattctccccatcactttcaggtacaccaatcagacatagatttggtcttttcacatagtcccatatttcttggaggctttgttagtttctttttattattttttctctaaaattctcttctcacttcatttcattcatttgatattccatcactgatactctttcttccagttgatcgagttggctactgaggcttgtgcattcatctcgtagttctcttgcggtggttttcagctccatcgggtcctttaaggacttctctgcattggttattctagttagccatttgtctaatctttttccaaggtttttaacttctttgccatgggtttgaacttcctcctttagctcggagtagtttgatcgttggaagccttcttctctcaactcatcaaagtcattctccatccagctttgttccattgctggtgaggaactgcattcctttggaggaggagaggcgctctgatttttagaattttcagtttttctgctctgttttttccccatctttgtggttttatctacctttggtctttgatgatggtgacatatagatggggttttggtgtggatgtcctttctgtttgttagttttccttctaacagtcaggaccatcagctgctagtctgttggagtttgctggaggtccactccagatgctgtttgcctgggtatcagcagtggaggctgcagaacagcagatattggtgaatagcaaatgttgctgcctgatcgttcctctggaagctttgtctcagaggagtacccggccgtgtgagatgtcagtctgcccctactggggggtgcctcccacttgggctactcaggggtcagggacccagttgaggaggcagtctgtccgttctcagatctccagctgcatgctgggagaaccactactctcttcaaagctgtcagacagggacatttaagtctgcagagatttctgctgccttttgtttggctatgccctgccctggaggtggagtctacagagtcaggcaggcctccttgagctggggtgggctccacccagttcgagcttcccagccgctttgcttacctactcaagccttggcaatggcaggcacccctcccccagcctcactgccaccttgcagtttgatctcagactgctgtgctagcaatgagggaggctccgtgggcataggaccctccaagtcatgcacaggatacaatctcctggtgtgccgtttgctaagaccgttggaaaagcacagtattcgggtgggagtgacccgattttccaggtgctgtctgtcaccctttccttggctaggaaagggaattctctgaccccttgtgctttcctggtgaagcaatgcctcaccctgcttcggctcacgctcggtgcgctgcacccactgtcctgaatccactgtccgacaatccccagtgagatgaacccggtaccgcagttggaaatgcagaaatcacctgtcttctgcatcactcacactgggggctgtagactggagctgttcctattcggccatcttggctccaccctcgatgttgggattttcatagggattgcattgaatctgcaggtcacgttgggtagcatggattttaatacctacctggccaatttattcctaagtttttttatttttttgtaggtattgtgaatgtgattgttccctttatttctttttttgtatagtttgttgttatctctttttttcttttttttcacaagcctaggttccagaaagtctgttgttagtgtatagaaatgctactgatttttatttctttttttcttgtaaatttttaacacattgacactaatcaaaagcaagctgctgatttttttgtgtgttgattttgtatcttgcaactttactgtattcacatattagtcctaacaactattttgctaaagtctataggattttccatatataagatcatgccatcaacaaacattggcaatttcatttcttttcctatttggatgccttttatttctttttcttgcctaattgctctagaaagaacttcaatcccatgttgaacagaagtgggagagtaggtgctatggtttgatatgatttgtttgactaccaagtctcattttataatttgattcccattgttaaaggtggggcctggtgggaggtgtttggataatgggacagatcccttatgaataggttagtgttatctttgcaataatgagtcagttctcactcttagtttttacaagagctgattttttaaaattttgtttataaattcacttttcttttttttaagacagtgtctcattctgttgccgaggctggagtgcagtggcatgagcataactcactgcagtcttgacctcctgggctcaagcaatcctcccacctcagtctcccatgtagtttggaccacaggcacacaccaccgtgactggttaattttttgattttttgtagagatggagtctcacttttttgcccaggctggttggtcttaattaaattcttgggctgaagtgatcctcccatcttgtgctcccaaagtgctgggattacaggcatgagccactgtgctcatccatgagctgattgttgaaaagatcctggcccctcctgcccctctctcttgcttccactctctcaccatgtaatctgcacattctggctccccttcatcttccaccatgtgtggaagcttcctgaggcccttaccagaagcttgtacagcctgcagaaacataagccaaataaacctcattgctttataaattacctgggctcaggtattttgttgagcaacacaaacagactaaaacagtagaaatccttgtcttgttgcagatcttacacgaagggccttgagtgtaatgttagctgtgggcttctcataaatgacttttattgtgctgagttacatttctttttaaaaaatttgcactcagggttatcctcaaagagatatatgctttctacatctaatttggtgaactttttttttgtcatctttctctctctctcttgctctctcttgctctgactctctgcctagggaatggaagataagagagagtttttatcataaaaggatattaaattttattgaatgatttttggcatctaataaatgattatatggtttttgtctttcattctgttactgtggcatgtcacatttattgatccttgcattccagtgataaaaacatttctcaaaagaagacatgcaaatagccaacagataatgaaaaaatgctcagcatcactaatcattagagaaatgcaaattaaaaccacaatgagatataatctttcacctgtcagaatgcttattattatgtttttaatcatcctgtactttatttcaaaacagagtgttttcaaatgaaaaaacaaaagataagtgttggtgaggatgtagagcaaaggaaacatttgtacactgttggtggaaatgtaaatcggtgcagccattatggaaaacagtatggagatccctccgcccaaaaaataaaaaaaaaccaaactaaaaatagaattatcatatgatttagaagtccctcttcagggtattaatgcaaaagactcaaaatcagtttgttgaagggatatctgcactcctatgttcattgcaatactatgcacaacatccaagtaatggaatcaacctctgcccatcaacagacaaatggattttaaaaaaatgtagtgcatatatacaatggaatactattcagcctttaaaaagaaggaaattctggctgggtacaatggctcacacctgtaagtccaacacttttggtgggtggagcacttgaggtcaggagtttgagaccagcctgaacaacacggtgaaaccctgtctctactaaaaatacaaaaattagctgggtgtggtggcatatgcctgcaatcccagctacttgggaggctgaggcaggggaatggcttgaacctgggaggcagaggtttcggtgaacagagatcacgccactgcactccagcccgggtgacggagtgagtgagactccatctcaaaagagagagagagagagagaaggaaattctgaaatttgtgacagcattgatggaattgaagaacattatgctaagtgaaataagtcaggcccagaaagacaaataccacatgttctccgttatatgtggaatttaaaacaatgaacttatagaagtggagagtagaatggtggtgacagaagctggaagatggggaaatggggaggtgatggtcaaagggtatttcagacaggcagaacatgatttttctttttgtgcattctattgcacagcatggtgaatatagttaatagtagagtgttgtacgtttcaaaattgctaagtaaatttcaaatgttcttgccacaaaaaaagttaagtatttgaggtgatggaaatgttaactagtttgatttaattatttcacattgcattcataaatcgtaacatcattttgtaccccataaattttttccccacgcaactccctcttcacagaacccatcaatctatacaattataaattgtcaatttacaataaaaaaagaagaaaaaaagaaaagcataaaattgaaaacttagaaataaaactttttaattgttcacatgacaggattgtacatgtaaaaaatctgacagctacaaactattagaaccaataagtgaatttagatacaaagtccatttacaaaaatcaattgtgtttctacatacctataacagttaggaagttgagtttttaaagatggtgccattataatatcataaaacatcaatgcctagagataaattgtgaaagatgtttaagaatcctaactataaaatattatttacaaaaataaaagaaaactcatataaatagagagatattaccaaattcctggattggatgacaacattataaagctataaattctccccaaagtgatatatagattccatgaaagcccaatacaactttgaggcttttggtgggacagagattgataaattatttgtaaaatatttatgaaaagccaaagagtcaagaatagcaatgaccatcttggaggagaataaagtttggccaggcatggtggctcacgcttgtaatcccaacactttgggaggctgaggcaggaggtattgcctgaggccaggagttcgagaccagcctgagaaacgtagtgaatctccatttccacaatttttttttaattaaaaagaaaagaaaacaagaataagttggaagactaacagtgagtatcaatataaggtcatagttattaagatggtgtgatgtcagcaaaagaataggaaaatagaccaatgaaacagaagagagaattcagaaatagaccgacacatataggtacacttgacttatgacgaagatcacactacagaacagaggggaaggggtgcacttttcaacaaatgatattgggtcaactagctatccatatggaaaaaaattaaacttaacccctcccccacaacacactcaaacatcaggtggattagagatctaaatgtgaaaagtaaaaccagaaatattcttatgacatagggctagagagtttaaaaaaataaaaaggaaatattctagaagataacactagagactatcttcatgagttggagtaggcaggtatttcttaaatgagacatagaaacactaaccataaacaaaaatgttgataaattggacaactttattaaataggagcttcaattcatgagaagacactattaagacttcaattcatgagaagacactattaagacagtaataaagtcagccacagagtggaaaaagattgctaaacatttaatcaataaagaacttgtcctagcctggtcaacaaattgagactccatctctacaaaaaataaaaaaattagccaggcacggtggcatgtgcctgtgtttcccagctacacaggaggctgaggcaggaaaattgcttgatttcaggaggttgagactgcagtgagccagatttgcaccactgtgctccagcctgggcaacaaagggagatcctgtctcaaaaaaaaaaaaaaaagaaaagaaaagcaaactacttgtacagacagacaccttataaaaggagccaataaatatatgaaactcagtcatcttactagtcatcagggaaatgcaaaataaaattataatgagatgtcaccatagacctatcagaatggctaatattaaaaccacactgcatccatcaactgatgagtggataaagaaaatgtgctgtgtatatacacgcacacacatacacacacaaatacacaccatggaatactatgcagccataaaaagaggaaaataatgtattttgcagcaacttgcatagaaccagaggtcattatcctaagcgaagtaactcaggaacagaaaatcaaatactgcatgttcttacttgtaagtgggagctaagctatgggtacgcaaaggtatgtagattggtataatggacactgaagcctcagaaggtgggaaagttgagaggggaatgtggaatttaaaaatcacctactgagtacaatgtacactattcaggtgatggtcgcactaaaagcccagacattattatcatataattcatccatgtagccaaaaaccacttgtacccctatcgaatttttttttaaagcaaattaagccaggtgtggtggctcatgccagtaatcccagcagtttgggaggccaaggcaggaggattgcttgaggccagtagtttgagaccaggctgggcaacatggcaagacccccgtctctacaaagagtactttaaaaatgttagctgggtgtggtggcacatgtctgtagtcccagctacttgggagttgggggctgaggtgggaggattgcttgagtcctagaggtcgaggctgtagttagtgagccatgatggtgacactgcactccagcctgggtgacagaggaagaccctgtctgaaaaaataagcaaattaaaaaaaaattaaaacactgacaaaaccaagtgttggtgagaatatgggataactggaactcttatacactgcagatgggaatgtgtgaattgctacgaaaacttaggaagatgtatttggcagtatcccctaaaagtgcttgacataaaattgaacatatacatagccagcaactccaaggtacacagccaacagaaatatgtacttgtgtttgtgtgtcgcaatgagaaagaacacttttcattgtgactcccaaatggaaataaccccaatgtccatcgtaaatggaaaaattgtctgatacgtatacaggagaagacgatacaccagcgtaaatgccacattactgctaagtacaacaatacggatgtgacttacaaatacaatattcaagtgaaagaagctggacctaatagaatatactgtatagtgaatgatccgtttataccagttcaaaaccaggcaagaccagtaggtgatgttaaaagtcagcatggtggttacttacaggcagagcgtaaggatagcggtggggaggggcaccatggcagctttgaagttttggtctgggtgtgttcactttcatcaagcttgagatgtgtgcacttttctgtgtaatgctatgtttcactttgttaaagcttagtttcaaaagtgaataatacctttctcttagagttgttgtgaggaatacgtaaaatagcggatctgaagcaaccggttcttagtttaacaatagcattgattctatagtatattgttattagtctaagactagtatttattctatagtgtattcttagtataatggtataagaataacatttattctatagtatatccatactagtataagaatagtatttatcctacagtatattctgattagtgtaagaatagcatttattctatggtatactcttattagaataagaatagcatttatgctatagtataatcttattagtataagaatagcatttattcttacactaagaaaaagttgcttcagatctgctattttatgtattcctcacaacaactctaagagaaaggtatcactcacttttttaaattaagcttttacaaagtgaaacgtagcattacacggaaaagtgcacacatttcaaccttgatgaaaataaacacacccagaccaaattttttttttttttgatagggtctcattctgtcacctaggctggagtgcagtgatggtgatcacagctcactgtagcctccatctcctgggctcaagcaatcctcccacttcagcctcctgagtagctgggaccacaggtgcatgccacaatgccaggctaatttttttatttttggtgaagaagggtttcatcatgttgcccaggctgctcttgaactcctgggctcaagtgatctttccaccttggcctcccaaagtgtgattacactttgggattacaggcgtgagccaccgcgctcggccacacctttcttttctatgcactgttgccaatataccattctggccctgatctttgagtttctgaggtctgtgggctgttcacctactagtatggaagtccaaaacccaatacacctcaataacaagacagtagatttcactgcggttcataaccatgaaagatttcagaggaaacagccacacaatgagccacgtttctgggttctgcgcaagtaggtgagtattgtgtcttgggtgcaaacaggttccggagattattcgctaggggttgcattccccatggttgcctgtgtatgagcaagtgtgttggaaatctttgtagggcaacaacatgggatggggttggctagcccataaagctcagtgtatcccatctcaaaaatcaactaggtctggcgcagtggcttgtgcctgtaatcccagcactttggaaggtggaggtaggaggatcgcttgagcctgggaggttgaggctgcagtgagccctgatcatgccattacacttcagcctgggtgacagagtgagaccccgtctcaatcaatcaatcaacaatcaataatcaattagactcctcttgggtaccagttcccagagattgaggtctgtgtgaaaagagatttcctttccatccattgcttggggatgcgggaactagaaaggaaccctctagggcagggtctggggcagggggcctggaaggtgggctgaggatattggaagcagaggggtctgggaagggaaagtattgggactgttcgggattggttttattgttcatatggagttccttggtagctgaagtgcctgggatacaaatgccaagatacctacccgcccacccaaagagtggtagtctgccttcttccatttgtacctcttggaaatccaccaccaagcttggagaattcaccctaacaaattgtaagtattaccaggttttcatgtaaggatcttgtggtagtgtggatagctgtgattggcatgtgagtcatagccagtcacagctaccaattacactgaggttggaacaccatttttactttctgtacaacacgagaagccttgaaaataaaatcttaaccttaaaaaaatagtaggctgggcacagtggctcacgcttataatctcagcactttagaaggctgaggtgggcagatcgcttgaactcaggagttcaagattagcctgggcaacacagtgaaaccccgtttctacaaaaaaatacaaaaaattagctggacgtgatggcatgcacctgtggtcccagctacttgggaagctgaggtggtgggatctcttgagcccaagcaattgaagctgcagtgagctgtgaatgcaccactgcactccagcctgggcaacagaggagaccctgtctaaaaagaaaaaaaaaaaaagtaatagaggctgtaggaaagaacagaggaacaacagctacttggtggggctggggctactagcaggtggcagttagttggtgagtgttgggtgggccaagggtctgatttctcataatatctagggatggggtgaaaattcctgctgccaggccagaggggatggtcagctccaagacaaggaagcagtgtccaggtaagaaatcttcatttcaatggatcacaaactcctaaactcttaacaattgaacagaagcataggttttataatctctgtgcatgtgggaaaacaggaaagagctcttcctctctcttctggctcgacaaaataaattcttacgcgtatatcccttccaggaaaaagcattcatttcaatgtcatcagaacagcacaacttagagttaaacaagccttcaggatgacagacttggtagcagttagtgattactttcataggacacaataatattctctgaagtctagatgttttatacagttttcctttgctagacataacatttggaaagacaatttcaagaagcgaaatcatacctacttttctgcagctataaagggtcggagagacattatctacttatcttgctgagttggttgttttccccaccagatatgtaattttcagagctaagcactgaagtttcactagttattttggagagagcaagtgccagaccccagagttcaaaacttagaagatgcaaagaaaaggtcaggataggattattattatgtggactatagatcttgtgtttcagatccacaggagtggcatgaatatgggtctatgaaatgctgattctatcagataatctgcggggggtttttcctccaattatatgggggaaaaaagctgtgtaagaagagatacattgtccactactttccagatagttctcagatttttataagttttaaaaatcaagtggtacatgcacataatattggaagtgaaatagtttgacagggcttagtataacaccagcagtctcctgctcctgcccccatcttgttcctaggggccatcactttgatgtttcttttggtacttagctctaaatggtgccattttgaggtttaactagatattatctatttccggaagatttagctcaattatactccctccctattttgctctccccacatcctgccaagatgattttatcactgttttcggttagaacaatattcgatgttcaccttgttatgagcctctctagtcacagttgtgctaggtgatgtactatgggtgcatttcatttctcatacaactttctgctttcctcaggattcatatcatcttactttttctttgtttcataactttttttttttggttaatcaagtacatgaagtctaccatcaactttgtatcctcaggagaaggtcccccgagccttctgcccttggatcctgactgggggctctctgggcccaccctcagctgtcatcctggactccctgtcacatgtatccagagggctcttttcccagggtggatccttgtttccttgatggagctgcttgcaggatatagcatgggaacagggtcagggcagggcttgggggtgccaaagcctccctgattcacagaaaagttgcatagggtacagggttttataactgttttgatgattggtacggatttcctcttttcacagactagatattagtcagggctgcttgtcactcacagatgtttttctgatttcaaagatgatgtgtcctttgccaatcctgcgattaacacaagggtaaggaaactccaagccccctctgcccttcagtctggttgttccaaacaagtagtcattgaattttctgcccagggtctacaaaccacccaatacagacaaccccgtgttctgctgactgtgcccaacatctgtagtggcaggttttccctcctggtgtcctcgacctccactgcatgaggcagccttagctcttcttcccacataatgagggctgaggtttaggtgtctcatttcttatttttcatttggggtattgcaaaaaagggaacagagatgtctttggtgtgacatcttaaaagtctcctattactactataataaatgtaaaaataaatgtaaaaaaagattcagtaaaaataagtataaaaaaagtccactattatttaattaccactctgccaaaaaaaattctaggggaaaaaaagtccagatgaaacatgtcacaatgctaacagtctttggacaataaataaatctatgtccttccctgcccctatttctaaagatttttttccagatttcccaaaatgtcaagattgacagtgtatgttaaccaatgggagaaaataaaacaaacttgaaaattgtaaggagctctgagtttttaaaaccttttcattttgaagcaatttagacttgtagaaaagttataaaaatagtacagttccaaacgcctaggcttaagccatcctcctgcctcagcctccgaggtagccgggaatacaggtatgtaccactgtgtccggcgtctctggacttctttgataccacttttatgtctcacaggtgcttgattttcttttactcttaccattctagccattcactcagtcttctttgcaggctactttgcaatgtacatttaatttacctcttccttgatgggggcattcctcagcctttgttctgaatgggatgttttcagagtcttctacagtatctctgggtgatctcttccatcctgttgctccaagctgatcgtgcctggatttgtatctccatcgtaggcctgtttcttgaactctagacttatattatttaagtctccatgttcctcgtctaccaaatccagttgatcacagtgtactgttcattttatttcctaaatctctcccaaatttacccaagcctctccttccccactgccactgctctagtccagaccatctctcaactgcttggctgcaacgatcctctaatggtctctctgcctttagtcttccctccccacatccttcctctattctgagttaataatacaccatctaaaagtgtagactggaccatgtctctttcttacctaaaaactttcataaaggcataaacatgaccttgggaacctgttggtccgaaaaataactcaatttaaaccaaggaaagagaacttcatcttgaagcagtgtgttttctggatattgttagatctttgaggacagaatcatgcttggcatacagtggctagtcaataaattgctgttgaatgaattaatgagtgaatgagaaaatggttgtttaatatctcctaagattattgccattaagttaataattatttgccaaacaattatgatatacagggctctatggtgggttcttcagggaatacaaagttgctcttttcatgaaccttacagttcactgagcacctgttatgtgccagataatgtggtaatgatggggatacagtgttatacaatatatacaggatccctgacctcatgaagttttttatttagtagtggagacacccacaaaaattacataattacttaattagagtttttataactgctattaataaaaagcacagaaatctataagaacactttatagtgggaccctaatctagcatgagggttggggatagtggagatggagaagggcagggtaggggtataagatatatatacataagtatagcaaaagaacatgctaagttccataagagaaccacagcaaagcaataatgagatttagagaagggagaatcatgctgaacaaataatgtgtccaagacccaaaggaactattctttaatgatgaatctctgggtatgcagtaaaggtatgcagcaaaggcacagtgaaagttgattatacaaattgggtaatttttgtcatactcaactaaaacagagtctagagaccagggaataaaagcactcagggcatagagcattgcaccaaggatataatcctctgctcgcttgtcttctgtaatctgaaacccgttactgaatagctactgaaacaatctgctacaactctaagagtagttttagttatcgctgtcactcaccaatctctgagcttgctggttccccaaagctttactagcgtcaataaacttactttcgaaacaatttgtaaaatttctcctttttataaaacttctgaagtttttgttcttctggcatactgaagaccacctggtctctgtgtatgccccacattacagttcttgcttctcaaataaaatggtttttaaaaatatatgtatacatatatatttaaacccacctcctacatagatgaaaatgttttaaattcagagatttgtctctatattttatttgacttcagcagcagtaatttagctgaggaaggggatgcatgtttgcccagtgtcctctaaattcttcaagcatcacttgggagtttgttaaaaatgcagaatctcagacccaatggcaaaactactgaattatacttgcatattttttcttttcttttctttctttttctttctttttttctttttcttttcttttttttttttttttttttttttgagacagaccctcactctgttgcccaggctagagtacagtggcacaatctcagttgactgcaacctccgcctcccaggttcaagagattctcctgcctcagcctcccaagtagctgggattacaggcgcgcgccagctaatttgtgtgtttttagtagagatggggttttgccatgttggacaggctgatctcgaactcctgacctcaggtgatccacccacctcggcctcccaaagtgctgggattgaaggtgtgagacacaatgcccggccacttgcatttttttttttttttttttttttgagacagagccttgctctatcagccaggctggagtacagtggcatgatctcggctcattgcaatctctacctcccaggttcaagcaatcctctcgcctcagtctcctgagtagctgtgactacaggcgcgtgccaccatacccggctaatttttgtatttttagtagagatggggttttgccatgttggccaggctggtctcaaactcctgacttcaagtgatccacccgccttggactcccaaagtgctgggattacaggcatgagtcaccatgcccggcctatacttgcattttttaacaacatctctgagtgattcatatagaccttacagataccataataaatggtgacattatgacattatgatgtcttttgcaaccccaccaacaaacgtcaggacactctgtagttgagcactgtaccactgaggtggcttcttgatctttaacagatgcagctcacgcaggaagtgcattggttaggtaaagtcaatttcctctcctggaggtaggttcctcactttcattatttgtttatttgttgatttttaaattaacacatttcatcttttaaagcagttttaagtttacagcaaatttgaacagaacgtacagagggtttccacatacccactgtctccacacaagcacaacttccccattattgatatcatgcaccagagcgatacattaattactatagatggacctatattgacacctcatagtcacccaaagtgcatagtttacattcaggctcagtcttggtgttgtacagtttacagattttgacaaatgtataatgacatgtgtccatccttgtagcatcatacggaataatttcactgctctaaaactcctctgagcacaattatcaccaaggtcatttcttaatttttaataggtgtggtacatgcaggaagtgcattgcttaggtcaagtcagtttcctttctagagagcattggaaagtttcttcagttgttgcagggcctatgatttgtttttgtttcagaatcagaatagaaggaagtatatgagcaaaaaatagcaggagggccgggtaagggagaggctatttccaaactaacttctcatgcctcataaacttggttccttttgttcatagctcccaaacattgctgtttcaaattccatactatcttggaattatattattttccctgaagtatttcataagttaaagcctgtcatctttaatccggccacatctcattaaattcatttgttttggctttatgaaactcatttttaaaatgcatacttcattgctgagtgaatttcttcatacttgatgttgtacaagtgcaattgtcttctacagtattttctacaaatgttcatattatacattttggctgagtttctattttcatcttactaaaaatcatttcttaaagtttaattctttcttttttttaactttgagacaaggtcttgctccatagcccagcctggagtgcagtggcatgaatgcagctcactgcagcctcaattcctgggctcaagtgatcctcctacctcggcctcccgagtagctgggaccgcaggcaagcatcaccatgcttggctaattttttaaaatagtttttgtagagatggggtctcgtcatgttgtccaggctggttaaagtttaattcagaattcaaagtacaggaggcactaacgcatgaatccttgacatgttccaatgtattcactgctaattcattaaatctttacaatgactctgagagatgggtctgtattgcttacaattgaagaaagtgaggttcaaagagtcaaataatttacccagggcttcatagggcccaagtcagtccaaccccagagactatgctctttcaccacactaagctttttagtacctacaaatcccattttaagaagttcctagataaccctgtaaattatatgttggctgaagacacttcctgatttaacatgtattcttggccctgcctaaagaattacgtggtagacaaccgctcagcctcaaaggctacctagccatcatgtcaaaagcaactgtggtgatttgtaacaaagtacatttaagaagaataaaaatgataaacaactcaaggcttcaaaaaggaaacggtaggcagtgtggtggctcactcctgtcatcccagcactttgggaggctgaggcaggaggatcacttgaagccaggagtttgagaccagcctcgccaacatggtgaaaccctgtctctaccaaaaaaatacaaaaattagccgggcgtgtggcacgtgcctattagtcccagcttaatcccagctacttgagaggtcgaagtgggagaatcacttaaacctaggaggtggaggctgcagtgagttgagatcatgccactacactccagcctgggtgacagtgggagagcctttcttaaaaaaaaaaaaaatagtgtaatatacattgttcatgttgattaataatattctgaactaattttccactaaaacctccagtgtcaaagaccattaaaacttactacgtttttaccacagctgaatttaacccaaaagcaactgtttttaaacttttaacatgaagatgagctcacaaaatgccaaaagtcttcaagtttatactcaatactaagttgcccaaaagtctagggagtgtttacttcacaacactccatgacaacagtgacaggtatttttttctcactaaaaaagtcataatattgatgttgtagtcccaatttgaagcatctttgcacttacatggaaagacacagtgatgataaaacgtatttttctacatgagaactgcagtgaccaggtacggtggctcatgcctgtaatcccagcgctttgggaggctgaggcgggcagattgcttgagcccagtagtttgagaccagtctgggcaacatggcaagaccctgtctctacaaaaaatacaaaaaaattagccatgcgctgtggtgtgtgcctgtagtcccagctacttgaaaggctgaggtgggaggattggttgaacccaggaggtcaaggctgcagtgagacaagatcatgccactgtactccagcctggatgacagaacgagatcttgccttaaacaacaacaacaacaacaactgtgatgtgtgtgtatgtgtgtgtaaattaactgagatatatcaccatctcctttaaaatatgtgttttcatgactgtggaaggtaggagtttttaaatccagatttaatctaagaatttgttttctcaattgcttggcgaatgtgaacctacaacgaatttaaatttgagaatgactttaaaacctgttaatacaacatactgataaaaaatgacaaaatgaagatgtaaaatggtgaactgaaattgaagaaaataataagaataacatgcctccttagtttatgggaaatgtgttacattagccgcttgtctctgcattgagggcaagatgtctcagtaattaataacaatagcaacaacaatgacaattttaacaatatagcaacagctatcacctgctgaacacctactttgtgcaagtttcttagacccgttaactctcttaaactccaccatcaccctatgaaggacacatctatagataagctacatatgtggctcagggagattagcttggtcatattgcagagctactaaagtggccgagctgggactctaagtcatctgactcaagtgtgtattcataagtactgctatgtggtctcatgtatagctaggcttttaaatgcttttttgaaaacttgcaaaaatgaaatctgtattatatagtagtctgttacattagcagctcccaagagccatgcattctggtatccatgcttttgcatagtttcctcctcttaaatctgggctggatccatgactggctttaaccagtagaataaggtggaagtggtgctgtgtcaggtctggtcctcagcctgaaaaagtctggcaacttctactgcttgctcttgagaatcttgagctgccaaataacaagtatggggctgggtgtggtggctcactcttgtaattccagcactttgggaggccgagctgggtggatcacctgaggtcaggggttctagaccagcctggccaacatgttgaaaccctgtctctactaataaataaataaataaaaataaattagccaggcgtggtggtgcactcctgtaatcccagttactcaggaggctgaggcaggagaatcgcttgaacctgggaggcagaagttgcaggttgcagtgagccaagatcgagccactgcattccagcctgggtgacaagagggaaactctgtccgaaaaaaaaaggaagtatggatccccacctgcagaggccacatggagagagagaaaatcccagacaaaccatctctcagcctagtccagctcctggcatcacctccaaagtgctagcgatatgggtgaagcattgtcttagaggttccagccccagctacctgctgactgcaactgcatgagataccaagcagagccagcagaagaactgtccagctgagccctgcccaacccacagaagtatgaggacataaaatggcttcggttgaatccactaagttttggggtggtttgttataaaacaataactgaaataaaaatgcatacctggaactggagtgcttatgtaacaaaaatctaaaacatgtatcattggctttgagactggctggggctcaaggtggtcaaatgacttgcaggcagtcacaaaaccaggaaacagcagagtcagggtttaaatctaggtctatctcttcactatacctcactcactatcttaagccaaaatcaccacatctccccaacagtgagcagttccaactgtagcccttgatgttggtgtcttatgtgattcacatcgtcatttacttttatttctttgattgtacaatggtacactttccaaaaggaaaatattccttgagagcagaaagtgcttctttgatgtcatttgtatttcacatagtagttagcaaatttgggggcatgaaattcccctacctcctatacattttgcatcagctacataaggctattcaccactccccacgtagttcacacacacacacacatgcacacacacacgtacatataactttttgttatataaattttcagataagcacaaaagttgagataataatatattgaacccccatatactcatagcttagcttcaacaattaccaacatttttctaataatctaacttccacccaacttcttttcctagggtattattatttttttttttttgagacagagttttactcattgcactccagcgtgcccaggctggagtgcaatggtgcaattccctagggtattttaaagcacatcctaagcaacatatgactttacttataaatgttttagcatatatccctaatagataaggactttaaaaaatgtataactacgattcatgccattatcagatttaaacaaaagaattttctttcagagatatggtctcattccgcctccccacacacgctagagtgcagtggcaccatcatggcttactatagccttgaactcctggactcaagccatcttcctgcgttagcctccagggtagctgggactacaggcaagtgccaccatgcccagctagtattttttttttattttttgtagagatggggtctcactctgttgctgaggctggagggcagtggcacagtcatagcttactgtaaccccaaacaccaacatcaagggctacagttggaactgctcactgttgaggagatgtggtgattttggcttaagatagtgagtgaggctgaagtaatcctcctgcctcagcctcccaagtagctgggaccacaggtgtgcaccaccatgcctggctaatatttgcattttttttttgtagaaatggggtctccttatgtttcccaggctgatctcgaactcctaggcttaagcaatcctcctgcctcagcctcctaaagtgctgggattataggcacgagacaagccaccaaacctggctccctcactaatttttaaaaacattttttttagagatggggtcttgctatgttgcccaggctggtcctgaactcctggcctcaagtgatccctccctctttggccttcgaaagcgttgagattacaaatatgagccaccacgtccagccacacacttgataaaattaataatctttttttattgtaatctaataccaagtcacaacttcctgattgtcacaagttttttcttctttctttcttcctttcttttttaaaaacattttgtttgtttaaatcagactccttcttttaaggtgaattcatattttaaaaatcagctaccaaaaatggctcacacattgcatttagttgataggtaatttaagtctcttttaacttataacattagccctctgcctttcctcctcagttatttgtggaaaaatccaattcacttatcccgttgaatctctcacattcatgagtcagctaattacttcttcatggtgccatttaacttcttctatgcctgtgtttcatctaaactggaaaattagacccaaggactgactacatgtaggttcaattatgtgtgtaaggggttgaggggtaagagagaagccttttgctagaacacctcctaggtagggctgtgtattagacattgtgctaatttacacagtgtctggctgtcccactcataccaacgttagaatcggtgtgtaggttgaagtgttttcagtttgatccatctgttctaaacttccccatgcacccttcttcagtctgatctgtctgttataaacttccccatgcatctttcatctagtgagtgatcctcaatcttggctgcacactggaatcacctggggagcattacaatcgccccagacgttctgattcacttggtctggagtgcagcctacacactgaggcttgtaacagctcttgggggcaggtgaggttgaaaaccaccatcctggtagtttcagcatcagttgacgattgttacctagatccatgatttcattaggtcttgcaaaatgatgatttttctaactccataattccatctgaatttattaccgggaatatttctgtgaaggactttccttaccatctctttcttggccccaaaatagaatgcatacaggaaaggagtacaaaggcttgattgcttcccttcatcagttttcaaaacaatgcgctgatgtcctagcgtgaatttatgaaggttaaccatgaagtttttaaaaacaagtatcattgtgaactcatgggttttaatatatgaaagtcaatttgaaattatagaggaaatgggtaactcccatttccagttgaatatgccagttgaaaactaaaaatttttattatagaatcaagattataatttgagactcacatgaagatagaaatgatctttacatttgtattcttcaaaacaaataattattaaaatgaaattcaaaccataaagaccagatttagtctcatgtcagttaagcatcttgcgcctccatgacacttggggaaattttgttaccagtggagctactgagtaccctgtgggtgtgtgaagcaagggccttgccaccagctggttagctcagggtctaagggacactcgttcttgggcagcgtggagttccataccaattagggtgctgtgtgccttgtcacttccacatacaggggatgaaatgagcacttaattcctgggtgggtttcttcatccccaattaatgggaacttttcaggcaactgtttaaggttcaattacactgaatgaaggacggggcggaatgaagttaatgtttattgagcacatactatatgccaggtatttcgtatataccatgacatatactcctcaaaggagccctagaaggcttaatattttaatttttgttttacagacaaattcatactgaaagttataaatttatttcctgcattactttacaaaacttacattgaattttaacccttttctcaactcataattataattcctttctacttattacttggtgagccatgtgattatttctctaactgaaaagcttgattcttaatattgctagtggaagtacttatcagtgaatacaaaattagtaaaaaattgataaagttgatattaaccataaaacatttggatgacaaatataagtagcaaatatcatgttttataatccattttaacataagactattctgcttctttcttatattattttttgaaattttgaagttatttgaagttctgagtaggcctttatttgaaagactactttttgtttctctttgagtgctaattattgaaattccagtatttagcctggaaactctaaactcttctacttctggtgaaagaaaactcagcaagacaagcaagcaagcaagcaagaaacaacagacagtttcctttttcttgcacctgcagagaatgagatgcttttccatgtcaccaaactgtatttgccattagctcctatcaaattagtttgatacgacactcagatttatgagttattgtattttgggaaagtaacttccaaaaaagtcgaattttgcttggttgtttatgtaatgatttttttgctcaggtaataatatttaaattgacatagcctcctttttaaaataaaggtataaatatttgtgtatttctttctatttctttctttctttttttttttgagatggagtctcgctctgttgcccaggctggagtgcagtggtgtgatctcggctcactgcaacttctgcctccgggattcaagcaattctccttgcctcagcctcccgagtagctgggattacaggtgcccaccaccacggctggctaatttttgtattttttagtagagatgaggtttcaccatgttggtcaggctggtcttgaactcttgacctcaggtgatccgcccacctcagcctcccaaagtgctgagattataggcgtgagccactgtgcccggccatgcatttattaacccagaagatgacagttgatatttcccatttgttaatatgcatggaaataaaacctacaaatgtgagaacatgaaataaatgattcaagaaaactgagaaggacgatattagggtttaaactgtgctctcccaaaagatatgttgaatcctaacacttagtaccccagaatgtgaccttacttagaaatagggtcactgtaggccgggcgcgtagctcacgcctgtaatcccagcactttgggaggccgaggaaggcagatcacgaggtcgggagatcgagaccatcatggctaacacggtgaaaccctgtctctacgaaaaatacaaaaaattagccgggcgtggtggcaggcacctgtagtcccagctacttgggaggctgaggcaggagaatggcgtgaacctgggaggcaaagcttgcagtgagcctagatcacgccactgcactccagcctgggtgacagagcaagactccatctcaaaaaaaaaaaaaaaggaaaataaaagaaacagggttactgtagaagtaattagttaagatgaggtcacattggagtagagtaagctcttaatccaatatgactcatgtctttataagaagggagatggtgtgaagagagacacacacagggagaaggccacatagtgatggtggcagagatcggagtgacacagctgcaagccaaggaacatggaggattgatggccaccactgggcagaggtaagagaggattctactgagagtctcagggagaagagccctactgacaacttgatttcagacttctagcttccagaacaaagaaaataaatttctgctgttttaggccaccgattttatggtatgttgttatggtaggcttaggaaatgaatacaggtggtaactccaattgaagcctaaatctgaataagtaaaaatagcgatgctggggtggggaggtaggagggttacctgtcactgctgtctagtgctggccagctttgaactctgttgctaaataattagttttgcttaaaatcagggtcactggaaaattaaaacattgatttttgtttttgtctgttgtcttatggcttttgacagatgtcactttgtcctgggtccataggataggtggaagctgctctcacttaatttttttttctttttttttgagacagggtctcactctgtcacccaggctggagtacagtggcagaatctcggctccctacaacctccgcctctcaggttcaagtgattctgtcacctcggcctcccaagtagctgggaccacaggtgcacactactatgcctggctaaatttttgtggagacagggttttgccatgttgcccaggctggtcttgaactcttggcctcaagcaatctgcctgcctcgacctccaaagtactgggattacaggtgtgagccgctgtgcccagaccctgctctcacttaaattagagatagaactattgcaattctgtcttctgaaataaagctttctaagcttgagagtggatcaagttagatttttattgtggtaagagatgagcaaactttctttctttgtaaggcttgagcctgttaaagtacaatagaaattagaatgtgaagattcttaaaccggccccaaaagaggcttcaacctttttgattgaaacaatgtatgtctagagtctatgtgttcctggaggattcatatgaacatatgaagggtgacaagggaaagaagcacctttcaaattagatgagataatacaccttcagatgtaatagaaagtaaagcccatatagttccttaaactgtatagatctcctattttcagtagcttcaagaggctatcaagtacataataatctaacataagaaagctcaaaaccctcccagaaaaaaaggaaggaaatctagccaaaattttattttcttcttattattttttgagatggggtcttactctgtcacccaggctggagtgcagtggcatgatcacagctcactgcagtctcgacctcccaggctcaagcgatcctcccacttcagcctcctgagtagctgagactacaagtgccccaccaaggccagctaatttttgtatttttaatagatatgaggttttgccatgtctggtgccatggctggtctcaaaatccttagctcaaatgatctgcccgcttcagtctcccaaagtgctgctgggattaccagcatgagccgccatgcccagccaaaaatataggcaaaactttaaatgtatgaaccctttaagaaaagtcgttcaggttggaagaaaatgaaaataaaattataggcttaacattaaccagattttcaaaagagttgagatttacattattctgcagaggactgaatcttagagtggttttcttttagagaaagttgccttctggtgtatgtgtgggggtggtggtgatataagtagcctttattaaagggagaatggtacactctatgttataggatgaattgtgtttccccaaaatttgtatgttgaatccctaaccctcactacctcaaaatgtgaatacatttagagatggaacctttaaagaggtaattaaagctaactaaggtcataagagtggggccctaattcaatacaatcagtattctcctaagaagaggaagagacaccagggaagcacatgtatatgaagtggagatcatgtgagggcacagtgagaaagcagcaactgcaagccaaaaagagaggcctcagaagaaacaacatctgctgacaccttgatcttggacttccagcctctagaactgtgagaaaatgaattcgtgttgtttaagccaccaggtcttatattttgttatggcagccctagcaaactaattctgcaagaattttaaaatgtataactatatgaacaaaactaagcaatcaataaaagtgtaaacagccttccatcttcctactataaatcactttggaagataaaagggaaacttttaatttgggtggaatgaccttggtgtccttgatgagtttcaagataaagaagaaggctattgtattaatctgttttcacattgctataaagaactacctaagactaggtaatttataaagaaaagaggttgaattggctcatggtaccacaggctgcacaggaagcatggctggggagacctcaggaaacttacaatcatggcagaaggtgtaagggaagccagcacatcctacatggctggagcaggatgaatagagggaagggggaggtgctacacatttttaaacaactagatctcaggacaactcacccattataatgagaacagcatgggggaaatccacccccttgatctaatcacctcccacgatgtccgttctccgacactagggattacaatttgacatgaggtttgtgtggggacacagtcccaaaccatattagttatgcaagcccttttgcactaagactttcaatcaagattctgagcgttgtttaagattttaaaaaaacattttaagttcatgggtataagtgcaggtttgttacataggtaaacttgtgtcatgggggtttgttgtacagattatttcatcacccaggtattaagcctagtacccattagttatttttcttgatcctctccttcctcctaccctcccaccctccaaaaggccccagtgtgtgttccactctatgttccactccccagttgttccactccccagttgttccactctatgtgtccatgtgttctcatcatttagctcccacttgtaagtgagaacatgtggtatttggttttctattcctgtgttagtttcctaaggataatggcctccagctccatccatgtccctgcaaaggacatgatctcattcattgttatggctgcatagtattccatgatatgtaccacattttctttatccagtctgttactgatgagcatttaggttgattccatgtctacgctattgtgagtggtgctgcaatgaacatacgtgtgtgtgtctgtataatagaatgatctacattcctttgggtatatatccagtaataggattgctgggttgaatggtatttctgtttttatgtctttgaggaatcaccacactgtcttccacaatggctgaatttacactaccaccaactgtataagtgttcctttttctccacaacctcaccagcatctgttattttttgactttttaataatggccattctgactggtgttagatgatagctcattgtggttttgatttgcatttctctaatgatcagtgatgtagagcttttttcatatgattgttggctgaatgtatgtcttcagaatgttttaaacattttttatttttgataatttcaaacttatggaaaagtcgtaagaatactacaaaaaactcctattcattctccccacaaaacattatatatatttgttttaccattctcactttctttctcactctgcctgcctgtctgtctatctatctatctatctatctagaatttttggggaaccgtttgaaagtaagttgccccattatcctaaacatttcaccatgtaattcccaaacaccaaggacacactcctatataatcacagtgctgtcatcactaccaggaaattaacatggatttatacgatactgacatttaatctacacacccccagtgacagtttgtcaactgttccaatagtggtcccaataattttcccaataatccctcaaattgggtttaaacatgcaagaattttctcaggagaaacacctgtgaaaggaaaggagaaagagccaggaaatgctgggggaactgtcagatcacattataagtctgaccctgagtgaaggagagaggaaggaaggtcgggtagaagcttcctagaccaaagtgctttatcaaaaaggtttggcaaggccatcagggagtccccaagtcaaagttggccatcagaggagtcccacgtctcccagaatgggcctgtcttagtgtccatgctgtgcttggtcactggctggagcagcctgtgggaagtgtggcctcagcacaaaagcaggatgagtttcagagagcagcagttggggcccttggctgtgtaagctctccataattggaggtctgtcaggtgcattctcacaccacagcagtccacttcttatttatttatttatttgagacaaagtctcactctgtcacccaggctggagtgtaggggcactatcttggctcactgcaacctccacctcaagcgattctcctgcctcagcctcccaagtagctgggattacaggcacatgccaccatgcccagctagtttttgtatttttagtagacgtggagttttgtcatgttgtcttgactggtctcgaactcctgggctcaggcgatccacccacctcagcttcccaaagtgctgggattacaggtgtgagccactgtgcctggcccagtgccatccacttctgtgtgtactgaccaattcctccatgcagcccctgcatggcccctgtaggccattcctccctaggggaaataagaagtgagaggttagtgggatgaactgcaggccctgtcactacaatggatctcagggctgcaactggttctcatctccactcctccactatccattctaaacacctctcaccctcagctctcacctctgcaggtcttggtgacttgcttacccaggggtatggccagaaccctcattcctaagtggtttgaacctttggaaattatacctttattggtttggggttactgcatgtatctgttcacccttacagcagggcatcagagtatcagaaggcactcaagtagatcgcttgggattcacacatattccctcctgcccccattgtgtgaaaacggccttgccctcttctgctgagcaggatccatgatccctgccagtctggtgactttttacacatgaggagaacaaagtgccccttcagcagctagtacttatagctcagtgggacgctcactgtgtgcctggaaagtgtgcatcccctttggggttcaggacctagagggacaggaagcacaaaataccccagtgggtccttggaagtgatggtaagtggggccactcctgtttatcccctttggcttctcgaccttgtatccttcctcgtggggatatggcaccatcgaggagtctatgatttaataaatatactgtctcctgaaggatggcaccccatctttttagagtgtgttctttgagctgccattcagttgtacacttagaaggctgttccaggattctatgaggctgtctgccttgggtgatatggtatgtgacacagacagtgatctcatgatcgcaggcctacctcctttgctgtgaagagagtctcctggtaggatgctgtggtatgtgggattccatacctatggattagacattccacaaactcccagagagtggtgccagctgaggctctgtgggaaggaagggcaagccatttctggaataggtatctgtctctgtgagttcggactgctggcccttccagtgtggaagggggttgatgcagttaacttgccaccatgtggctgtttggtctctttgaagactagtgccactttgggagttcagtgttggtctctgttcctgacaagttggacattcagaggcagcagtggctacactggctttggcaagtaggagtccattctattgggcccatatgtagccatctctgccaccatggccactctgttcatgtgcctattgtgccggttctggagtagctgatgacaaaggctggctgatgttaactggctgagtcattttgtctacttggctgctcagtgcctcttacatggtagatgctctctgttgagcattaacatgtgatacaaaatgttcatacattatatccacttccatatgtccatctacatgcttctagagtctacccagagctccttgtctctgattttccagttattttctttaaaggctctgaccaggcagccagaccattggccacttcccaaacatatatatttcttttttttactatttgtgactcttagggatgtagtgttttttaattattattatttttatactttaagttctggggtacatgtgcagaacgtgcagttttgttacataggtatacacatgccataatggtttgctgcacccatcaaccggtcacctacattaggtatttttcctaatgctatccctcccctagcccccaaccccctgacaggccccagtgtgtgattctcccctccctgtgtccatgtgttctcattgttcaactcccacttatgagtgagaacatgtggtgtttggttttgtgtccttgtgatagtttactgagaatgatggtttccagcttcatccacgtccctgcaaaagacgtgaaatcatccttttttatggctgcatagtattccatggtgtatatgtgccacattttcttaatcgagtctatcattgatggacattgggttggtttcaggtctttgctattgtgaatagtgctgcaataaacatacgtgtgcatgtgtctttatagtagactgatttataatcctttgggtatatacccagtaatgggattgctgggtcaaatatatttctagatctagatccttgaggaatcgccacactgtcttccataatggttgaactattttacactcccaccaacagtgtaaaagcattcctatttctccacatcctctccagcatctgttgtttcctggctttttaatgatcaccattctaactggtatgatatggtatctcattgtggttttgatttgcatttctctaatgaccagtgatgataagcattttttcatgttcgttggctgcataaatgtcttcttttgagaaatgtctgttcatatcctttgcccactttttgatgggattggttttttttcttgtaaatttgtttaagttctttgtagattctggatattagccctttatcagatgggtatattgcaaaaattttctcccattctctaggttgcctgttccctctgatgatagtttcttttgtgtaccccaaggatatatatttcttctccttctccttcttcttctttttaaaaaaagagacagtgtcttgctgtgtcacctaggctggagtgcagcggtgccatcatagttcactgtagcttcaaactcccaggctcaggtgatcctcctgcctcagtctccgaagaagctgtgactacaggtgcacacccctacactcggcttatttattcttacttcaggccacttctccttccacacaaagtgaataatcaggtgcatgattcagagctctgcctactgagaaaatcttcccttttcactgtctttcaggactactccctacagcatgtggctataacacagtcacagttcatttctggtctgcacgcacatactaagctaacccatctgtaagctatgcttgagtttttttttctctttcacttagttgtatgggcacctctttagctcctgtagagaaataggtgcaaactagtgcaagtgtggtgagtgacataggggagtataggagagtctggactacctgctcctgcagcttaattgtgtcctttgctcctgctcaagttccattctggatttccacattaacacgttctgcttctgggcccatccaacttggggacttgttaggtccaacagaatccagcttatcatggacagtttcagatgcatggttagctggtgtcccaaggataagtgttcagtctctatcaggatccactaacgtgcaagtgctatttctcaaatggcatataattctctgctgtggatgtcatggccttgttccagaatcccaggtgcctgccttgggattctccctctggggcttgccatgatccccatactgcattgtccaactattgccagatagaatgccacaggctgtcagattgtaaggtgcaagttgcagggtgtgattgcgccatgtactgcagtactgctgcagtacttcctgctctaggtcccttgaagcatgcagctctacatgtcacctgatttatggtccagagtagtatttttggtatggagtatgttgcctgtagaagttaaatagtcctgccagatgctatgctttcttctttgcggtaggggatgcaagatacagaaatttgtcctttactatggaggggacacctagtgcaactcttactgctgaatcccttaaaaatttcacaggagtggctggttcctgaaatcttagcatggtttatctccagtcctctggaatgtgtacatcttaccaaggcccctagagccaccacttgttcatctgttcagaagcatgatgtcaaagtaatgggtccatgtggtgttctctgggctgtccagatggtgcagatttctttgtactatattatgactgaaagcaagagttaaaataaccctggagcaaaatgtaactgaatatttttgtccgttccacatgaatgtgaactgtttctgatcttcttttcaattggaatggaagagaatgcattcgccaaatcagtgctcacatacttttcacctgaaggcttactaacgttgatctagatgacaccaaatagcagccagaatcagagttactcctcggttaagcctgtggtagtctatagtcattcttcaggatcttgccaatttcttcaggggctaggctaacaaattaaatgaaaatataacgggaactgccttccctgcatcctttagttctttaatagtggcacgcatctcttacactatgaaactgatttttatttatcatcttggctgagttgtgggcagcttcagaggtttccatttggccgtccccactataatagttatgctttaccgacccgggcctaatgttggggatagtccaactatgcacttggctgcttgggaaatcatccacagaccaaatgaaccactgtgagtcagatttcagacagaactccattcattaccttgtcccattgtaacaggcactatgatgatatttcaggtttctgggtatcagtgttaactcacatcccatattcaacagaccttgaaatgtctggttatttcctttccccagcatatggtcacatgagtaaatgcccataggtacctttggggaagagctggaggaattgtcatggcatacatttgccatggcattgtaagattcttcctcctggggacccatcacttcagccagtgggttccagatctgcaaattgacttgagtttgagaactaaacaagaagttgtggctttttactgggggcaatcacccatagcttcctgctcctttattattgctcttcgtgggttatggatgttaagtaacattcttattggctgcctgtctattttgcctctaaggacatcattctccattaaccatctccacaactccctgtggctctagtcccggtggctgtctgactaaccatgccagttactgtggtaattgtgacctcctagcttctattatttgagggctcccatcatgcattcccatgggtgttaatgagcccagctttgagactgcctcacctaccatcctctttggcatgcagtggacagccatcactggacttctttgatgcaggtgcccctctcaccagtgctttctggcagtcttggtgagtggcgtgtaatctgggacatgtcatagaacaaaatcctctagctgcattacttctggtcttacctaatatatccattccttcatgctcatttccctcaaactctttatttcttcctctaccatatgtcaggggaatttgggcatttccatgttgctgagagttgggagtcaatgaaagatgagagagctgtcagacaatgatgcaagtctgatcctgtgtggaggagaggggaaaaagattgggtggaagtatgccagatatttactcaaagtcaagcaaaagttggccattagaggcatcctttgtctcctaggagaaggcctgccctgctgtccttgccatactcagtcatcagctgggagcagcccatggaagcatggccttcacacaaatgtgcaatggatttcaaagtgaggcagctggggtgctttgtgaattaagctccaagttgaggtctttgaagtgcattctcacaattgccagagtgtcctttacagcaaaaagaattttttttctagtccgagctacagcctaggattacatggtgactttgtcttgtctttttaatgttcttcaatctagaacagtctttccatttgggtttgggtttaacgttttcttttctttttactttgagacagggtcttgctatattgcccaggctggtcttgaactcctggcctcaagcaatcctcctgcctcaaactcccaagtagcttggactacaggtgggcaccattgaaccctctaatgtttccttatagttactttctattgtgctgttttgttttgttttattgggtcaggaatacataagaaataaaaattgttcttttagtggcatgcaatttaatttgtcctgttactaatgatgttaactttgatcacttggttgaggtgatatattccaggattctctggaaaattagtgtctttttcctttgtaataaatagagcatcttgtggggatatgctttgagactctgtaattaccctcagtgtgctaaagatctgaggggatatagagagaaaattctgagtcacactttcatttcatgtagctgaaaaagcaacttaaacattggacttgactgaaattaagcttggacttaactgagctccttcaggaaaagcttaattacttactgagacaggaaaatcatcaggacactctcggatctcaatgtgggtactgggagtgccagagaaccaagattctccctcccactctctctgatgtgtgtgattcatatgaacattgataaaggatgtctcatccctccttcaagtaaacttgttctgacaaaatttcaccacactttgtcaaatggcaaacattgttcctaagaaacatcatatacgtgtttatgcaaattttgttttttaaactttttatcaagaaaagaaaaaaagtggaaaatatgtttttgcctgaaaagtgaatattataaacaagtagcttgggtttgaaagatagtctgtggaaacacagataaggctctatgctaagatgcttgctgctataatcctcagtcccctagtaaaagtttctgcaaaaagcttggccagccatgatgccattgagcattgacccccataatcaatctccctgtgactctcacggagaatgctgaagcaaattttctgtagtgagggatctgtagaccatggcatgcagcctccagtctcactgtgcagactgaggacagtgacacaggtcattgacacacggctgacctaggcagtgattctccctacactaatacagtgattctttctgtgagagactgcctgcccttaataagataacatgcccctttggccgggcacagtggctcacgcctgtaatcccagcactttgggaggccgaggcgggcggaacatgaggtcaggagactgagaccatcctggctaacacagtgaaaccccgtctctactaaaaatacaaaaaaaaaaaaaatagctgggtgtggtggcgggcacctgtagtcccagctactcaggaggctgaggcaggagaatggcatgaacctgggaggtagagcttgcagcgagccaagatcgagccactgctctccagcctgggtgacaaagcgagattctgcctcaaaaaaaaaaaaaaaaaaaagaataacctgcccctttaacctaccaactctcttctcctctttagtttgttgaagcaaaaacaacgtaaatattgcattaaccaagtgtgtgtatgagagagagagagagaggagagagagagaagagagagagagagagagaatgagcagttatggctcttggcattttttactggacaaggcaaacctaaagattttacttttaaacttgaattaatgctgagagtaagtcacatctgccctcacttccctcccactccacacaaacatgcataccactggaaaggcaacattttatcaaaggcatttggcgtttttcctctcttatgaccctctagaagcttgagaatgtgggagagaagggctggaaccagaaatggagaagtagtgctggaacaataatgacctgaaagccagtggaactgaggtctcctgcaggaacttttggggaggcctggatactttggagaccaatgggtatggatggaaagaagagcagaaatgattcagctcataaagcagtgaaaaggaatgatctaagtacatgaacaaatctttaaagcaaaatgttaaagtgtgggagcaagttctacagaacacatacaatatgatacttttttttttttttttaaagagacagggtctcactctattgcccatgcaggggtgcagtggcacaatcagagctcatagcatccttcaactcctgggctcaagccatcttcccacttcagcctcctgagtagctgggacttcataggcaggcaccaccacacccagctaatttaaaacaatttttttggctgggcgcgggggctcacacctgtaattccagcactttggaaagccgaggcaggcagatcatgaggtcaagagttcgtagaccagcatggccaatatggtgaaaccttgtctctactaaaaatacaaaaatcagctgggcgtggtgggatgtgcctgtagtcccagctacttgggaggccaaggcaggagaattgcttgaaccccggaggccgacattgcagcaagccgagattgcgccactgcactccagcctgagtgacacagcaagactccgtctcaaacaaacaaacaaacaaacaaacaattttttttttttagagatagggtcttgctatgttgcccaggctggtctcaaactctgggcctcaagccgtcttccctctcagccttccaaagtgctggaattacagtcgtgagtaactgcacctggccaacatgatgccatttacatgcagcttaaacgcatatacatgtgttgaatcagtgtcatgtgttgatgagggacataaacacatttactaaaagtataaacagttgcatgggaattagtaactttaaattcataaaattgtactggctatcaggtgagtaggggacaagtggaatgagggaatgagaccagctgggtacccaaatattgctaatgttattgcttaagctgtgtggtgaatacacaggtgttcaatttactattatttcgcactttccgtgtactttagctatttgacaatacatttaaaaatcgaaaacttatcccataatcccaggctccagaggtgatagtaggtggtgttttccagacctttcccgctgccttgattttctgttaactggccaccatccttgtctcctcgcgctgccggtcgctgcagaacccctgcgcggagggactgccagttcccaggaaggtgcaggacagctggagcctcttcttctctgggcagggatttaaatgttcttgggtagcctcgccagagacctgtgcggccctacagtgaccttctttccagccactttcccatgagctcaaagctttggattctgtcacttgcaaagggtcaggcctgatcccttgcgggttcttgagaagtgagtaagacttccagcgccccggcccagactgcgacgacccagactgcgacgacccagtctgcgcctggcgcaggctccatagacggcttttcttcagctctgtccactgagacctcgagcccttgagcagaagatgggagagagagggtcttgctgggcgggctccagaagtcctcctggctctgggcgcaggagttggaagagaagagatagagaaacatctactcaccagaattgtaaactggaagaagggtagaggaaaggtgcctagagagggcagctggaatcaggattgggctgaatattttaggagtccccaagtgctacttctatccgctgggagcacgggttcgaatctgcccccaggcagcccgctcctggttctcttgtccccctgtgctgcggcggggcccacttcggccctcgggttccccgcacaggccacacagggcagcagcgcgcgccgtacccacgggcagttcgagagggccgcgcgtggcggagccaggcccttcgccagcgcccagtacaaatttagtactagaattaagagaaacacactgaaatctgacagccccgcctaagacccgggcgtgaggaagtctgcggtgggtgatgaatacaaagaacagtttctctttcctgtcagtaaaacgctgtttccagagcctgccaggtttcgccccagtggccacacctatgcctggcaggtgctggtccgagcccctagcgccagcaaaagaaaggaggcggacgcaacattctcgaattactaggagaaggagggaggctttcccttccccccagtgccccatgtaccaacgcgtctcgccataccccttgcccctcttccagcagctgacggagtaattcgagtaggaatcgaaagatttggaggcgccgggggagaaacctgcggagcgctctccgagcctgtggcgtcccaggaagactccgagcggggccagggaagttctctggaggacatggggtggatacccaggtctccttccctgggtgaaataagaactgaaaatctaaaaataaaataaataaaataaaatagaaaacacagagaagcaacaaaaaagcgcttcccctcctcagttctccccagtccacccaaggtttaccaagactgttgtagttgcaagagtgggcttccggctccacgtaacgatgcgattgggctgtacctctgtctgtctcctgcgcgatgtcccgccccgggaggtgtcacggaactcagctgatataagcccgggatcccgccgggtcaggttctctgctctggacttgggaggctccgttgcctgctcccggagggagacgcgctgccgaggagaacccagcgggtaatgaatcccccgcgcttctttgcccaggccttccccaaacctccccccggtctgcgcgggttctcctattgggctgtggtgaagacaaggtgcggcgactgcagctccccaggtctgggcgctgccgggagagagtctttcccgctggggagatttagtttgttgactcaggagcacctccaacgacagctagtggcagaggacccgggagctgggaggttcggaacgcggggcgagctggggaggagggagaggcgccgacccagcgcagcctacatcttagcaaaccaaacctggcaacatttccccacggttcaggagcacgaaggacttaagggaaaacgacgaaatcggggctcccgaggatgaagttaaatgggttgtggcctggggacaaatagggccaatgtccagtctattacaagaggctttgttccagaggcttgcctataagcccctggcttggaacgtcagtcttcaaactgtaacaacaggggcaggctactagggtagcccacaaagccctgtatcccccatacagtgactaactagagccctagttggtcatatccgcagtggctgagactgcggtgtgattccgtttccctcttgcatgtgtcccgggagcccgagttgtcgaagcccaaattcaggctcaggaacctgatgtgctgttgatgccaaacactgacacacagatgcttggagacagaggaagatttattccatttggccaaagcgagaaggcaagaggtcaagatctctcaaatccaccctaacaaaaagaagtagtggggagtttttatgagaccaggaagtaagggagggggaatttcagggaacctcggggaaaagtctttcttcgtctcagattacatcttgaaccaccagacttctgggcgtcagcagctggtcacaatgcccttaaaggcattcattccttctgcaaaatttttttcttgactctgaagctatatcctcctgcttgacaaagaaacggtgcatcagcagtttataattatattgctagaaaaaggaatattgggcaaaaagtgggtagttaacatatgcaaataagcaagggcctcatcggaattttcatggtttcatcactaaaaatgttggggtgctgaaatcttgaggggctcggttgcaccagaaggggatcctttgtcactagtgcaggcaggaagggatgcttgagggaggatggggggaacttttcaatagttcctcccctcccctaccaatagcgggtgggagggcgttggtttagagccaagcctctaggagaagatgagagcaatggctaaagtttgtctggcctcgccctatgagaagggggcggaggctgtgcctgcctttgtgggggaaaaagaagccgattcctaatctgtctgtctcatgggaggtgagagttcctgtggcaggataacagacaagcaattcagtgtgataacatcctgtgtcagaagtattcatttaaatgtcacaagaggccgggcgccgtggcttatgcctgtaatctcagcactttgggaggctgaggctggtggatcacgtgaggtgggcggatcacttgaggtcaggagttcgagacagcctggccaacatggtgaaaccccatctgtacaaaaaatgcaaaaattagctggatgtgatgacacatgcctgtaattccagctactcggagcctgaggcaggagaattgcttgaaccaccccctccccccaccataaaaaaagtcacaagaattaaactcttttgtttaagaaaataagcagttttattatttccatgtaagaggaagaagaggaaaatgctgtgatccactcctggcctgattatgaaaattcacacgtgtttatagcagccccactttaaccatgggatatgtcccaagaccctaagttgatgcctaaaaccagatgcctgaaaccatgggtagcaccaaaccctatatctaatgtgttttttccctatactttcactgtttcacttaaagaaagcacttaaagaaaggcttttctttggcatatctgaattgccagcatcactactctggagatttggggccattaaataaaataagagttacttgaacataagcagtattagagttgatctggtaagtaagaaggctaccaagtgactaagggctagtagcatatacggggtgagtacaccagacaaaggaatgattcatgtcctggggtgagagggagtggatggcatgagatttcatcaggctactcagaatgaaacttgaaacttataaattatttatttctggaatttttcatttaatatttttggactagagctgactgtggtaactaaagcatggaaaaccaccagataagggaggactactatatactatcagaaaatagaaatcatttccagtattattgttatggcaaattgaatcatatgatatacactcttttatgtctggcttctgtcactcagcatcattgttttcagattcatctatgtcattgtgggtaccaatagttctttcctttttattacggttgagtagtcttctattatatggataatcaatattggcttcttcattcatctactgatgggcatttggattgtttccagtctatgtctttcacaaataaaaatgttatgaacattcatgcacaagtctttgtatggacatatgcttttttttttttttcctcttgggtaaatactttggtgtggaatggctgggtcatatggcaagcgtacgcagaacttcttaagaaactgccaaattcttttccaaaatggtcgtacccctttatatccctacaaggagtatatgacgatgcccattccttcacatcttcaccaacaactagcatggttagtcattttagccattctaatagatgtgtagtggtatctcactgaagttttaataggcatttccctaacgactaatgatgttgagcataattcaatgtgcttatttgtatccatatattttctttggtaaattgtctattcaagtattttattcatttttaaattgggtttttttatcattactttttgagtgttctatatataatctacttacaagttctttatcagttatgtaatttgcaaataccttcttccagtcagaggtttatattttctttttttcttaaacttttactttaagttcaggagtacttgtgcctgacgtgcaggtttgttacatagataaatgtgttgccatggtggtttgctgcacagatcatcccatcacctaggtattaagcccagcagccattagcaccattctgatgctctcgctcctcctgttgccccctcctctgacaggctggggcttatattttcattctcttaatagtgtctttcagaaggagaagttcttaaagtccaatatatcatttaaaaaaatttattgtgcatctaggccaggtgcagtggctcatgcctgtaaacccagcactttgggaggccgaggcagggagatcacttgaggtcaggagtttgagaccagcctggtcaacatggtgaaatgccatctctactaaaattacaaaatttacccaggcgtggtggtgggcacctgtaatcccagctactagagaggctgaggcaggagaatcgcttgaacccaaggggtggaggttccagtgaccgaaatagcaccactgcactccagcctgggcagcagagggagactccatctcagaaaaaaaaaaaaaaattattttgttcatctaatatcatctgtaagaaatgtttgcctaacccaaggcaaaaatattttctcttatatttttctctagaaattttatggttgacaggctaaatatacatacaaactctggccaggacatatgcaaaaatagaactctgacccagaactgctgcagtaaccagcctgggaagccaaacacaacttctgcagcagttgactggtagtggtcaggaccttgtcaataactgacagcatccttaatttttgctcctgattccaatttaggaccagtcagagaaagccaaatatgttccccaaactaatcatacaggatgttcatttctagttagcctgcttccaacttccctacgacaacacccttgaatcatatcatacctgagcattccctttttgtcactatcaatctttcccctgcctgtctatgaggctttgacaaatgtgagtgatgatggcggctgactccctcgttatagtgagctctgaataaacagcctctgcttgttctcatccaggcagacttcattaatgtctttagtttccttgcaggttccaccaaggtaccatctgcccactgtgtggactcccattttcaaacaggatggctgctacagaggcaccttgcaccttgcagagagtggtttgttgagtttgcactgataggataagtcagcactgactgaatgtctcttttttttgagttcctcagctactgattctcatttgatacccgggttttgttattggttcccatttatttggcaccctaggtggaatcaggccattctctttcacctcttttggctctcttttttgtgtgtttgtgttgtgctgtttaaaagcggtttgtccgaagaaggagaatgacagggtcagacataggcataggtcctacaagcctgttcaagcttgcttcacagtccagtgagtttgtggttctccctgaacccatgtccatgtggacaaactttgttgtgggtcaccaataaaaccagctcaggttctccttccatcttgcgtttttgtcctgagagcttcactttggtccacggggagtgctttctctggttttctgcctactgaggggcacagattgtctggtctgtgttaggaggtgcccaactgtacggttggggacctgagacacaaagtgcacaagaattatactcctactgatggtcaacagctctcatggggtcttctaagtctaaataccctcctcatctaggagaaactgcttcttatttgtacaacactagctcatgcacctaccttcctaccttcctaatggcataactccaaggatgatctgggcctttactggctattttggggtacatttgacttgaacaaaattgttcatttgacatgcaccttagaaaagtaggaataagatttctcaggatgaatggggctgccgttttttgttggtaggcagaggcctccaaatgaaattctgatcaaaaattgcttcattaaaagattctttgcccaaaaccaatgggaaatttgacacacttaaacaacaacaaactagactcatttccctagtaaatgcttctttttcttgtcttccagatgcctccgtgtatccagctctctcttttcccccttatccttctattaggttggtgcaagagtaattgcaatttttgccatgactttcaataatctctctcctatacttcagtcaactgctcacttctcttcccccttttcagacccccaccctttgcccaataactctcctaaactccaaaattccagttgcctctgaatatccatccctctctttaagccaggtatgcagacatctgtagaatttaaaccttggatccaagctgaattaagagttatacttaaaggtttccctaaacccagcaagactagcaaaaattcacaaaagaatttagaattcttctaggtacatatgacccaaggttacctaacctctatcaacttgtacacatgttggtcagaatctcaggtgctaaatcctggagggcaaaagctgattggacagactcagaaagggacccacagtatccctctttccatagtaaatccgagggttttaaaaaaaaggatccaaaaagtaaggcaaagtctcctaaaagccatacccaaatcatttctaataaaaatccattggaccatgcaaacaaaaaaataaaactgttggactttttcaggatagactaggaaataccttccaacacatcagttaaagaaggtggtaaaaagcagccctttcatctcattttgtcagtggagttaaacatgaaattggagacttaattctaaaacagaaattggaatggaaaacaacccctttatctgaattgtaacaccaagcagaacattttgaaagagctttagaactaaaatgagacaggactcaaaataaacttgtggcccacttcccaatcaaccacctattgacaaggacactacagatattgtaaacagaaccaagacaaataaaaatccatcagttcagatcaatgagggtgctcagaggaaggagaaactacccaatagtctgcctttccctaaacactcaaggtgatttaactataaatacaggtggtcaacttcatcaatttctggtaaacatggtactactctttctatgttaaacactgtcccttttgctcaatctcttcctctgagtaaacataccacacaggtggtaggtatttcaagtaacccacatataagccacatatttattccatctcccagcccttaactgtagcccttggtccctgactgaaaaacattccttcctcctctttgatatcatgcctatgagtttaatagagacttaatttgcaaatggaactgtaatatgtattgatgttccagagacttctctattcataatcaagttgcacctgctatgaatacacctttgctttctctattatatttgatgcatactccaaataaatatcttgacaccaaacctgacagtgtaaggggctaaaaattccactcacataggacgaataattggagaagcaaaataataagcagaacttactaagttcagacagatcctgtcaaaccattacccaaacttccccaatatccatagaagtcagacgcaaaggaatggctcgaacctacagttgaaggccttatatgcaaaggtcctctcctatcccctagtaacactcctgtcccgccagcaaagaaaccaagtggatgaagatattgatttaagacttcagaaccatcaacaaaattgtcatttcttttttcccagtagtgcctaacccacacaccatctgtcattaattctacttgaagtcacttgctttactgtagtagaaattttctctgcctttttcagtgcacctttagacaaagacagtcaatacttttctgcctttgccttgggaaggacaatggtataactggacagtcatactccagagattcattgaagcccctgtttttgtccagatgctcaagtaagagttaaaagatggctgggcgcggtggctcacgcctgtaatcccagcactttgggaggccgaggcgggcggatcacgaggtcagatcaagaccatcctggctaaaacggtgaaacccggtctctactaaaaaaaaatatcaaaaattagccaggcgtggtggcgggcgcctgtagtcccagctactcgggaggctgaggcaggagaatggcgtgaacccgggaggcggagcttgcagtgagccgaggtcgcgccactgcactccagcctgggcgacagagcaagactcatctcaaaaaaaaaaaaaaagagttaaaagacataaatttcccttgtgaccttgtgattcagttctgatacaatataaaaatgatctcctactttgttcagagaacaaggaagcctgttaaaaggattccattttcttgctctcagccttagtagagaagggacataaaatttttaaggctaaattacaattttaccaaaacacaattcattatttgaagtaaacctctctaaggagggataaatattctctcctgataaagattatccgaagttattgtaaatccctcacaaaatgacagatgagaggatttctaggttaactggatattgcaaacaataggtgccaaagttttctgaaattggagcacctctttatggattgactgtcttcagtgagggattctctcctttgaaagtccaaacataaagacctcctggaacctgaaatcagttcttcaacagcctccttcccaaagcaccccaactgtagaaagccattttgtctatttgtgcgagagcgatgtagagaagcccttgggccttcaacttcatggaaaccatgaaaaccccattatttgctgtagcctcactcttgacctgtttaaaaggcttatttctattggtttagggcattagctgtcactgcaaaacttgatgatgcttctgccaaactagctctaggctcattccccgcctgacctcatggtttctcatgcaacacaaacattactaatttggggtttttttttgtttgtttttttgttttttgagacggagtctcgctctgtcacccaggctggagtgcagtggcgcgatctcggctcactgcaagctccgcctcccgggttcacgccattctcctgcctcaacctcccgagtagctgggactacaggcacccgccaccacgccaggttaattttttgtatttttagtagagacggggtttcaccgtgttagccaggatggtctcaatctctgacctcgtgatctgccagcctcggcctcccaaagtgctgggattacaggcatgagccatggcgcccggactttttttttttttttttttttttttttaaagacagagtcttgttctgtcgcccacgctggagtgcaatggcatgatttcggctcactgcaacttctgcctcctaggttcaagcgattctcctgcctcaacctcccgagtagctgggattacaggcacacaccaccacgccctgctaatttttgtaattttagtagaaacagggtttcaccatgttggccaggctggtctcaaactcctgcccccaggtgatccacccatgaaaaaatctggttgaatctttactctcataatctctggtgctctcaaaatggccacttgctggcaccaaattatttaaaatggatattagctaaatttctccatgaaattactcattataatatagacaaattggtcactatcttaaatccacatccgtgggaaaactaaaaagacagctgagcggtggggcatggtggctcatacctgtaatcccagcactttaagaggctgaggcaggaggattgcttgaggttatgagtttgagaccagcctaggcaatcttgtaagaccctatctgtacaaaaaatttaaaaaattagctgtgcattgtggcgcgttcttgtagtcctagctacttgggaggctaaggcaggaggatagcttgagcctaagagttcaaggctatagtgagccatgactgcactccagcctgggtgacagagtgaaaagccctgtctctaaaaaaacaaaaaccaaaaaggacagctgaggatattttcaggttatgtgtcgcctgtcaacaacataatcctggaaaaattctaatgtcatcttttgttcctctatagataatgtgcctttttcctctggatgcttttaagatttttttctgtatcactggttttgaacaatttaattatgatgttcctcagtatttttttttttcacatttcttgtgcttaaggtttgtgtaacatcttagattttagatcttgattttttctagtgttcatcaaattttcttcaaaaatgttttagttgtttcagacaggagagtagcctagtccctagtactttattctgactggaagtgaaagtctcatgaatgtagttttgaaaatcatagttccttagacacagtaaggaaaccaatggcctcagcctctcccacttctgcttgccaggagcctcttgtctctcgggctttttcttctggcacgtgtttctgtatttctaaacagcatgcttattttctcctttctccctcccaccccctctcattttagatattgtcttagtcaatttgggctgctgtaacaaaataccatggactgggtggcttttaaacaacaaaaatttattgcacacaattttggtggctgggaagtccaaggtgctgagagatttggtatctggagagggccctcatagatggtgccttctcactgggtcctcgcatggtagcgggggtgtatatgctcccttggacctctttcataagggcactaatctcacttatgagggtacatcatcatgacctaatcaccttccaatggccctatctcctaataccagcacctttagggttaggatttgcacaatgaactttagggagttgcaaacattcagaccataaaagatactgtttatttctggaagatgactgtatagcactctctctctctctctcttttaaatctttggagacagggtctccctctgttgcccaggctggagtgcagtggtatgatcttggctcactgcagcctcaatccactgggctcaggagatcctcctacctcagcttcccaagtaggtaggactacaggtgcatgccaccatgcttggtgttttggtttttgaagagataagaactcgttatcccattatgttgcccaggctggtcttaagctcctggcctcaagcaatcctcccaccttggcctcccaaaatgggggaattacaggtgtgagccgctgtgcctggcctgagtatagctaacagtttttttttttttttttttttttttgagatggagtctcactctgtcacccaggctggagtgcagtggcatgatctcagctcactgcaatctccagctcctgggctcaagtgattcttgtgcctcagcctcctgagtagctgagactacagccgcatgccaccttgcctggctaatttttgtatttttcgtagagatgggatttcactgtgttggccaggctggtcttgaactcctaacctcaggtgatccgcccaccttgtcttcccaaagtgctgggattacaagcatgagccactgtgcctggccaacacttcttatcctatgccttccttctccacatcctgccaatacaactatatcttatatcatcattttttatcagaacaatattcggagtttatattatcatgactaggactttatttacaacggtgccaaataatgccttatggttatcttttatttactatactactttttattttaacttagcattattgtcttatatttgtatttgtctgtcttcctaagtgcctatgaccaattcatcccctactctccaccctctcagtttactaagtgatctgtcaattgcatggtcttaggctctgtccaccgaagcctgctgctctgttgtgcagttttgcctgtgatctgtaggcctgctctgcagctgttattcccagacctcccttcacaaacatccaggggatttttaaacttcctttccttgttgaatctcttgtttcctgcatccacttttttgagggaagaaatgcagggggcagggcaaagacagtgtccagagagcatgaaatctgaaatctcagttcacagtgccaactcttacgacacagggttctgtaatcatgcatgagtcactgtttttcttcctacttcagagaacttcaaattttgccagcaatgcccagcatccattactgcaggcattctattttggtgtcatcaacttccctgctcaagttttcagtgcacttggcattccttctgcgtacatgttgaggtttaaatttctggatttcggccgggcgtggtggctcacgcctgtaatcccagcaatttgggaggctgaagcgggtggatcacctgaggtcaggagttcgagaccagcctggctaacatggcgaaaccctgtctctactaaaaatacaaaaattagctgggcatggtggcttgtgcctgtagtcccagctactcagaaggctgaggaaggagaatcacttgaacccaggaggcagaggttgcagtgagctgagatcacaccactgcactacagcctgggcaatagagcgaggctctgtctcaaaaaaatcaaaataaataaataaataaatttctggattttaaaaaactcactattgtttttcaataatctatgaggggtgaaggaggtacagacatctttcttgggattcttaagttagaatctcctgttattcttctaattagaaaaaggattaatgatgttaaaaaagacaaatcttattgttaatggctctgcaaaccaacaacacaaaaatatttagagaaaagtgctgaaggaaatgcattagaatgctaaatctttaaatggtgaatctataagtgttctttttctttaattctgcctttggtttttctttctttgacacattgagcacatattacttttactgctgggaaaaatgtaagttgaaataaaaacaacatagaaaacactgaatctgcttttagaaaatgactaccatgatatgtgtgtgtatgcgtgcgcacatgtgcatacgcatgggtgttttagcggaatctaatctaatctgtgtgtctctcagagttgggaggtagagccttagggctttaactagagatgaaaagacatacatggaacaatggatggagtcctgcagggaaccattgtctgcctgagcagaaagcttgtacttgtataacagtgcctgggaaaaaaaatgaaaactcatttcattttgggataattttattgtaaagtataccacacatacaacagagaataaaactttattacatagttaaaaaaatattaaaataaacacacatgtattcactccagattaagaaatacatttctagaagctaagaagcttcctgtatatttctcccctatttctctgtctccctaattccaccctcttcctccccaaacagaggtagccactattttgaatgttctattatttccttacttttctttatgatattactacctatatatgtctccctaaataacacattatttagttttacctgtttttgaacttcatataaatggaatcataatagatgtattctgtggtttgtgtattttttacaacattatattcttagagttcattcaaaatagtgcatgtaggctgggcgcggtggcttacgcctgtaatgccagtatattgggaggccaaggcgggcagatcaccggaggtcaggagttcaagaccagcctggcaaacatggtgaaaccctgtctctactaaaaatacaaaaattagccgggaatggtggcaggcacctgtagtcccagatcctcgggaggctgaggcaggagaatcgcttgaacctgggaggcagagtttacactgagccgagatcacaccactgcactccagcctgggcaacaagaagtagactccatctcaaaaaacaaaacaaaatagtgcatgtaatagtgaaagtggatgtcattttccatattgagaatgactttattactgtgtatttccaattttttgctattttgaacagcaatcctttgaaaattcttgttcatctctccaggatatctgcttttttttttctgttttaatctcacaaaacactaccagtttggttcttttacacctgtttcagagtatatgcaagtaggttaaaacaattttcctaaagacacaaagctggcaaatactgggagtttgaactcagggtttcctcattccacagcccaagtgatttactattacacgatgccaccttccttttagtgattgccttgtggcacagctgcatgaaattgtggatactgaggtcaatcaggtcataaaaagcctcttttgatctgatttcatgcttatcaagcagccttctgaaatctggcttcacatactctacaccaggggtccccctggccctggaccagtacctgactgtggcctgttaggaaccaggctgaacagcaggaggtgagtgtaagtgagcattaccgcctgagctttgcctcctgtcgtatcagcggtggcattagattctcataggaacatgaaccctattgtgaactgtgcatgtgagggatctaggctgcgcactccttatgagaatctaactaatgcctggtgatctgaggtagaacagtgccatcctgaaaccatctcctcaccaacccccaacccccatccgtgaaaaaattgtcttccaagaaactgatcctggggaccactgctctaaatctacaggaaggaatgagatgctttgaaataaacacctgagctcccccatatttacatttcccactgaacagtaatcaagtatcactgtgactcagctatttctgttttgagtttggggtacgaaatcaccttccctcagaagggaactttggggtcctaaaaagattaattttatggtcctgacatgtcgaagactaggtcttagatacaattaatttcaccaaggacctgccattccagtggcaattcttggcagccggacaggtggcttttcctggcaacaccccaacaaaaacttgagctcttttgccaatgtttacattgtgtactcatgatttattatctactggatctcagatcctttgttcccgctggagtaaagcaatttttttttttttgcactagtgcttgatgtcttgtggagttactatggagcaagctgaataactgcagcctggtgctgagatgttgggctcagtcttgcctatgccccttgtcactgaaaatgcccctgctcacagaaacacagctaggatgtatatatatgatttttttttgacaagatggaaaccgtttggattaggggaagctgacgtcgttgctatgtatctgttccatagcaacaatgacaggttgccaactcaatcagatgtgtcccctcccaatattaggctacaaaataatctgaaaattgcccaagtctcagggagaggagaaagacaaagaatcaagaaaaacaataaatattagcacaccccagagatacttctgaccacgaaagctttctcattgctttccagctccagtccacaaatatcaatgtaaaattttctattttctgcaggtgacctgcgagactctgccactttgagaacttggcagatagttactaaatacacagcataaatataacctgttggtcatttctgtggtggtggtgtgcttccagcagactcagctcctcaactcaccttacaagcttaattcatgtataaatctgacctcaagctatgtgggaatttcattcatccattttcacactgctgttaaagacatacctgagactaatttataaagaaaaagaggtttaatggactcacagttccacatggctggggagtcctgacaatcacggtggacggtgaaaggcacgtcttacatggaggcaggcaagatagaaatgaaagccaagtgaaaggggaaaccctttatgaaaccatcagacctcgtgagacttattcactaccatgagaacaaaatgggggaaactgccccccatgactcaattatctcccaccggcttcctcctacaacatgtgggaattatgggagctacaattcaagatgagatttgggtggggacacagtcaaatcatatcaggaataaatgaagggaccaacctcagtaggatggccttaatctgttggttttcctgcctctcctattcttgtcctgttctaatggttctatctttctgtttttcaggagaacatttcaggataggaataggccaagtgctgagaagatgagtcttaggattgatgtggatacaaactttcctgagtgtgttgtagatgcaggaaaagtcacccttgggactcagcagaggcaggagatggaccctcgcctgcgggagaaacagaatgaaatcatcctgcgagcagtatgtgctctgctgaattctggtgggggcataatcaaggctgagattgagaacaaaggctacaattatgaacgtcatggagtaggattggatgtgcctccaattttcagaagccatttagataagatgcagaaggaaaaccactttttgatttttgtgaaatcatggaacacagaggctggtgtgccacttgctaccttatgctccaatttgtaccacagagagagaacatccaccgatgtcatggattctcaggaagctctggcattcctcaaatgcaggactcagactccaacgaatattaatgtttccaattcattaggtccacaggcagctcagggtagtgtacaatatgaaggtaacataaatgtgtcagctgctgctttatttgatagaaagcggcttcagtatctggaaaaactcaaccttcctgagtccacacatgttgaatttgtaatgttctcgacagacgtgtcacactgtgttaaagacagacttccgaagtgtgtttctgcatttgcaaatactgaaggaggatatgtattttttggtgtgcatgatgagacttgtcaagtgattggatgtgaaaaagagaaaatagaccttacgagcttgagggcttctattgatggctgtattaagaagctacctgtccatcatttctgcacacagaggcctgagataaaatatgtccttaacttccttgaagtgcatgataagggggccctccgtggatatgtctgtgcaatcaaggtggagaaattctgctgtgcggtgtttgccaaagtgcctagttcctggcaggtgaaggacaaccgtgtgagacaattgcccacaagagaatggactgcttggatgatggaagctgacccaggttagggagcaatatccacaatggttgtaatgtttgctggcagcaaggcagggcgggtcagagaggaaagagggatatggtattccttggaatctggggaaagagatttactctctgatttgcaattgtctgacttattaatccctgtagatgtagttcgtggattattgcccttcctttcttctgccatcttaaatagtcttcattcaacagatgccctggctagtagccccattaaaggctggtgcagggggctgtttgacctagttatttcaattttcacatcctttcttatgttcatagtcaagcctcttatttttcaattatgagcttgcatttaattatttaggaaatttctttttttcacatgtacagatgtgtccactttaatttactgccactttcctctgactttcccttcttaaatattcaccctttctcactgcccacttccattttttgaaccaaaatatgaccaaatcacggctttcgctctgctttcccatttttcctttggggagccggtacgtgataagccagaggatggttggtgacatgcatctatcctggaaaaggaaagcctgagataaaattagacagagaaaaccaatagtaacttcttcaaaggtccagaaaaaacaaagtccacctcagaatctgctcaggtgtctatatccattggcctttgcatcttctcatcatttttctttaaaaagtagcattctaaaaatataaaaacagtctgggcacggtggctcatgcctgtaactccagcactttgggaggccgaggggggcagatcacctgaggtcaggagtttgagaccagcctggccaacatggtgaaactccgtctctaccaaaaatacaaaaaattagctggatgtggtgacgcacgcctgtaatcccagctgctcaggaggattgcttgaacctgagagacggaggttgcagtgaggtgagatcatgccactgcactccagcctgggcaacagagtgagactgtttcaataaataaataaataaataatagaaataaaaatagttttgttttgacataataaaattaaaaagtgttgctttatgctaggttattttttccttcaaaaacctcagtaggctttcctgagctgacctgagatgtaaaggcaagtatctgtgggccgtggcttgagttgtaagactaggtgaaagactttgtagcacagctcagctataagttggggtctgcctttttgcatattgaatccttggttcttgtttcctaagacctttccaggtgtcctgagatggttctccagttgagtttgtcatctgccacgccccgcagcaagcctgtgtgcattcataagaattcggaatgtctgaaagagcagcagaaacgctactttccaggtaattggccatctctggttgctttggaatatgttgattgttcattcatataaaaaattgactcctactttatattatatacagaatcaattccagaggtttaaggacttaaatatgaaagccaaacctttaaaacttttagtagaaagtgtatatgaataattgtatcattggggtaggaaagcatttcctaaaccagacacaaaaggatcaaacttaaaaagactgataaattttactacattaaaattaagaactgttcctcaaaatataccttaaagaaagtgaaaagactgggcacagtggctcatacctgtaatcccagcactttgggagggtgaggtgtggaattgcttaagtccaggaatttgagaccagcctgggcaacatagcaagaccccatctctacaaagtagcagcactctactatgccaggctaattttttaacttttgtagagatggagtctccctgtgttgcccaggttggtttcaagctcctggactcaagcgatccttccacctgagcttcccaaagtgctgggattacaggcatgagccaccacgccaagccaccagtctttttttttttttttttgagatgaagtttcgctcttgttgcccaggctggagtgcaacggtgaaactttggctcattgcaaccttcacctcccgggttcaagcagttcttctgcctcagcctctcaggtagctggaattagaggcgcatgccaccacacccagctaattttttttgcattttcagtagagacagggtttcaccatgttggccaggctggtcttaaacttctgacgtcaggtaatacacccacctcggcctcccaaagtgctgggattacaggcatgagccactgcgcccagcccaatcatttttttgatggacttttatatgacgtctaattttttcatttttaaacaatgctataatatacattttaccataatatacctgaggtgttctttaaggataaattccaagtagtggccaggcacagtggctcaggcctgtaatcccagagctttgggaggccaatgcaggcggatcacaaggtcaagagatcgagaccatcctggctaacacagtgaaaccctgtctctactaaaaatacaaaaaattagctgggtgtggtggcatgcgcctgtggtcccagctcctcgggaggctgagacaggagaatcgcttgaaccctggaggcggaggttgcagtgagccaagatggcaccactgcactccagcctgggcgacagagggagactccatctcaaaaaaaaaaaaaaaagaaaaggaaaagaaaaaaaaattccaagtagtaataattacttgtaactttagatggatattgccagattgtaagctaaaacatatacccaaatacactttgaccaaccaacatggtattatcacggcatttctcttctggaagaagcttagaatcattttatcctatcaaaaagaaaaaaagatggccgggtgaggtggctcacacctgtaatcctggcactttaggagaccgaggtgggaggatcacttgagcccaggagttcaagaccagcctaggcaacatggtgaaactctgtctctacaaagaaatacaaaaattagctgcatgtggtggcatgcacttgtagtcccagctacctagaaagctgaggtgggagaatcacctgagctcaggaagtagaggctgcagtgagccatgatcataccattgtaccccagtttaggtgacagagcaagaccccgtcccccccaaaaaaaagtctccatgctgtccctttttagtcaaactctccccaaatccctaacctctagcatccattgatctgttgcctgtacctatagttgtgctttacagaatgtcaggtaagtgaaaccatacagtacgtaatcttgccaggtgttaagatggcactctaatgccttcctcaccatccttgtttccacctctttgcctcgcactttggatgtcagcaacacaaactgcttggagtgacctgaatggaccttgctttttatttatttatttttttttgagacaggatctcactctgttgtgcaggctggagtgcagtggtgtgacctcagctggctgcaacctccgcctcctgggtttaagcgattctcgtgcctcagccccccgagtgggtgggattacaggcacgcaccaccatgcccggctaagttttgtattttttgtagagatggggtttcaccatgttggccaggctggtgttgaactcctgggcttaagtgatccaactgcctcggcctcccatggtgctgggattacaggcatgagccaccacgcccggcttccttgctgtttcttgtccctgagtgttagtcatgtgccctcttttgaccatgtctctattctcctcttcaactcactaactccaagtcatcctttaataatcagctcagggctgggtgcggtgacgcacgcctgtgatcccagcactttgggaggcccaggcgggcagatcacttgagcccaggagtttgagaccagcctggccaacatggtgaaaccccagctctactaaaaatacaaaaattagccaggcttggtggcacacgcctttggtcccagctacttgggaggctgaggcaggagaatcacttgaacccaggagacagaagttgcagtgagccgagatcgcaccactggtgcgacagagcaagactccatctcaaaaaaaaaaaaaaagaagaagaaagaaaaagaaaaaagaaaaaaaagaatcagctcaggtgtttccttcttcataaagactttcatattttcttctttcctaaattgtacctttccttggtattcacataatactttctgtccttctctctagttgtattgaccactttttaccataattattattgtctgtttataccagctaattagcgccccatcaaaataagaattgtttatctttttattactaatgtataacctattgtagatacatagtagagtcccagtgttgattaattcttctacgtataatgatgattactagcttgtctgaggcttttctaatttcttcccatcctttccctgtctagtattttcagacagagtggtatatactccagaaagcctctacaaggaactcttctcacaacataaaggactcagagacttaataaatacagaaatgcgccctttctctcaaggaatattgattttttctcaaagctgggctgtggatttaggtctgcaagagaagcagggagtcatctgtgatgctcttctaatttcccagaacaacacccctattctctacaccatcttcagcaagtgggatgcggggtgcaagggctattctatgatagttgcctattctttgaagcagaagctggtgaacaaaggcggctacactgggaggttatgcatcacccccttggtctgtgtgctgaattctgatagaaaagcacagagcgtttacagttcgtatttacaaatttaccctgaatcctataacttcatgaccccccagcacatggaagccctgttacagtccctcgtgatagtcttgcttgggttcaaatccttcttaagtgaagagctgggctctgaggttttgaacctactgacaaataaacagtatgagttgctttcaaagaaccttcgcaagaccagagagttgtttgttcatggcttacctggatcagggaagactatcttggctcttaggatcatggagaagatcaggaatgtgtttcactgtgaaccggctaacattctctacatctgtgaaaaccagcccctgaagaagttggtgaggtatgctgcttgtctgtgttcactttattttcttgagtgactgtggctggtgtggctttcagtttacttgctaaaattcatattgtatttaccatgaccagaggggtttaagagtagaatctgctttctttgtttcattggggaaaaacctgactctgtttcttacagtttcagcaagaaaaacatctgccagccagtgacccggaaaaccttcatgaaaaacaactttgaacacatccagcacattatcattgatgacgctcagaatttccgtactgaagatggggactggtatgggaaagcaaagttcatcactcagacagcaagggatggcccaggagttctctggatctttctggactactttcagacctatcacttgagttgcagtggcctcccccctccctcagaccagtatccaagagaagagatcaacagagtggtccgcaatgcaggtccaatagctaattacctacaacaagtaatgcaggaagcccgacaaaatcctccacctaacctcccccctgggtccctggtgatgctctatgaacctaaatgggctcaaggtgtcccaggcaacttagagattattgaagacttgaacttggaggagatactgatctatgtagcgaataaatgccgttttctcttgcggaatggttattctccgaaggatattgctgtgcttttcaccaaagcaagtgaagtggaaaaatataaagacaggcttctaacagcaatgaggaagagaaaactgtctcagctccatgaggagtctgatctgttactacagatcggtgatgcgtcggatgttctaaccgatcacattgtgttggacagtgtctgtcgattttcaggcctggaaagaaatatcgtgtttggaatcaatccaggagtagccccaccggctggggcctacaatcttctgctctgtttggcttctagggcaaaaagacatctgtatattctgaaggcttctgtgtgacaggaaacccaagcctaagaaacaattaagtggttctcatctctaattaactgtgaaaccatttaatccaaacatgtaagcacacactcacttattaagtcacatacttttctaggtgctggggattgagaacgaatcgatgtaagattcctcctttagggcagagacagaccactgacaaatacacagatagacaaggaatttcccatggtaaaaagggatatcagtaattagaggaccgtgagactcagagatgtgtgtgtgtgtgtgtgtgtgtgtgtgtgtgtgtgcgcgcgcgcacgtgcacatgtgtgtaggtagatggagggggtgattattttgggtggtcagggaagtgctcagtgagggaagaacttgtcatgagaatctctgagcgtgccaggcagactcggatatttttataaatttttaacatggccacttgcagaagagcttgaatgggacgtgcagcgagaatgtgaaggatggagcaggtagctcatctggccttgtaggtgccgggaacgggcaagacatgttttgaaatgtaagatcacagactgttttttgcaagaccacattatattactttattattttctgctttttcttttaacgacattagtgtttttgatcactatattttaaaatgctttttgtgagccttttggttatgtggaatctgttccttagctctgattttttattcttatggagcgtcttaggttactacatgaaggtaagactgccacagtcccccagggaggcacactgtgttttactgattgatttgaagatgatagagagcctagggggatgagtctattggactcaaaggttacattttgtttttccatttaatttaataatcaacaaaacgacaaagtcagtttaatatctttcttctgctgagtcttcaggatgttagctagtctttcaaaagccattgctacaaaagtgcaaatttctcatttcctgtgggtctctagaaactctctcaatatttaaagccaaacaaatccatcttttctgagagacagaaactaaaaaattcagagttaattcactattaaaaacagcaaggccctgctatttcccaagaataaagaaatttaaaattctcattgtaagaagtatgaacttgaagctagaattggtttatttctggcagctacttacaatattaagaactttactttttaaatttgagacaatttcacaggaaagcaagaaattagtctattgtgaaatgtttttacaactaacttggaatatactgcaaatcactagtaagtagagacacatttaagataaaatgattaataaaacaattggtaattctgaataaggatctgaataaatccagatcacagactgttcctttaccaatatgtaaaagaatgtgcaaaattagtaaaaatatacccaaaaatttaccagcaacagagaagcaaagaatggagttcaaccttacactataaacatctaatagatatgtatgaaaatttaaaaactagaaaaggttgggcatggtggctcatgcttgtgatcccaggactttaggaggccaaggtgggaggattgtttgagcccaggagttcaagaccagcttgagcaatatagtgagaccctgtctctacaaaaacaaacaaacaaacaaacaaataaataaataaataaaattagctgggaatggtgatgcacacctggagtcctagctactcagaaggctgaggcaggacgatcacttgacctcagaagtctgaggttacagtgagctatgatcataccagtgcactccagtctgggtgacagaacaagaccctgtctccaaaaattaaataaataaaacaaaaaaaaagaatttaaaagttttatataaaggcatagctactatctcatctgcccagtgtagtcatgaatagatgtcacataaagaaaagaaaaccagaattcttgttaatatggccagtttgaagggtggtggcggaggtattgagcaggcagctcagggaaatgccagggagacccttgagcacagaaactcctgattgtccccagggactctccgtggacacaggagggattttccaggatttcacatgaattcaatgaagggggctgtgtcttattcctggatgctttgcctccttcatggaattcagtggatttaatggaagttcctaggcaacaataaagagtagaaaccaggttaacagcgagggcctcatctcacaccagatcatatcaggctacacaaaagtagatggaagacaccacccaggcctccagctatacactggagaagaagccaaactagtctacttcatctaagaaagttgtcaaagagagcccttctatactatcttaaggtaaaaagaaagactctacccagctgccctgattaagcattagaaagataagtgttctgatcattaggcgaaagacaatggggaaaaatgtagaaaagaaatatgacatgagccagatgaagaacccatcctgaaaggatatataactcaggggacaaaagacaactcaccataagttgggcgcagtggatcacgcctgtaatctcagcattttggtaggccaaggcaggtggatcacctgaggtcaggagttcaagtccagcctggccaacgtggtgaaatcctgtctctactaaaaatacaaaaattagctgggtgtggtggtgcatgcctgtaataccagctactcagaaggctgaggcaagagaattgcttgaatcaaggaggcagaggttacagtgagccaagatcaggccattgtacttcagcctgggcgacaaagtgagaccctgtctcaaaaaacaaacaaagcctccccatagatgtctcctgccatagaagaatttaagaagttcataaattcaataaaacaagagttgaaggcctgtcccactgtacccaatttctccctctctgaactgcagcctagaaactctctacaggcagtaagctggggcagtcacagaggtgacctcatctgtttcccacatcctgcattaggacagtgatcagggatcagtatccttcattgactgatttccaatatctcgagacctgttgtttcatatattttgccttattttgcaattgtttcatatattttgtcttattttgcaattgtttcaggagggaggataaatatggtccctgttcctctatcttgaccagaagcatctaagaaggcagtgaagcaacatgtgtacagttcttagggaaacaaattttgacctaaaaatattaaacctagtcaaaatattattctagtacaaaggcagcacatgggtatttttgaacataaaagagttctagaaatacaggacccatgaatcattcttgaagaaaagttactcagtaaggaaatctagctaagcaagcaacatgtacaaataaaagattattataattggaccaaagttaagtttaaatccattcacatgtatataattaagatatataggaattataattacagaaaagaatgttacaaaccttcacaaagtaaaaatatttttatatcagatagattcttctgtttcaatccataaaaccagggtttggatcattttaaaaaaacaaacaaaaataatttattggaatcattagggaggacctgatagaataaaatgacaagctgaccaaataggccttagaagggagaggtgcctgggcagttacaaggacctaggtagcaggggtgacttggccacagtcattttctttacttgatttaaggaggttaaattacagtgagagagttgcacttatttagtttgcataccgtactcaactcttagctagcatagggcaggttccttagttgaaaaatttccacaaaacatgatgtaaagtggaaagatcagttcccccaaagaatatcagttaccaaagtaggatgaaaggatgttgggtagatcaaaacaacaaatgtccattacagcaattaacaaaagttagggagtggggaagtctgagtgctaatatggatttcaaaacaactttaaaaatggcttcaaacattttatgctttttgtaatttagtcattttaatattagataaatcttcctgtaactgaaagttcttgagttaaagaaaaatattcggtagttcagctcttccttcaattttattagttgctttttcttttgttcaagtgaaataaacataaaaataattttaaaatattatgtatcatatccttcgatttaacataattctatctagctgttcttatattttctctgatatatttttaaaagctttctggaatattattaaccttgaatatttctagttgatgagtttatgagtgatttattgcttccttttctctttcagtattgctagaattaattttattgactttgcccctttgcataaagaccttgaaggtcacatgctgaaatcgccctctactaaaacaaactcatagaaataatggggaagatatttcaaaacattgccatatgcatagccatcctcacaaccaagaaaagcgcctctccatgaactaaaacctatgagtcattggtacaggtagggaaaatctaggtaaaccacggtaatacactgaggctggcaccaccacaggccaggacaaccgttgtcacaaagccaggacagaatctcccagccagaaagtgttgccctgaggctgaagccaaattcattttgcccccagttggccagaccaaagcctagaactaaaaaacccatacctcagggtttgtcagcattggcactgctggctttttgggctggacaaccatttattgtgagaggcttctctatgcactgtaggatgtttagcagcatccttggccctactccctagacgccagtagcaaatccaccaccctccctcccctaccccagggttggttgtcagttgtgacaaccaaaaatgtctccagacatcgccaaatgtcccttggggggtaaaatcaccaccaccatacctcttttgactaaaagagtttccagaatagtggcagaatatataggtcaagcataacacattacaatcaagattcagaacatcaaagattcttttttaatcctaaaagaaaaagtttggaaaatctacaaaaagaagtgtgaatttgacaataactatttcactagcaagggtagacgtaagcagaatacaggtagcatattcaaactgctgtggaaaaacaacatcaaacctagacttctctccccaaactatcattcagagtcgagggcaaaataaatagattttctgacttggaacaagtaggaataatgtacttatagtattcatcttcatacagggatggactataagtgatttttaaaaaacttcctacttgttccaagtcagaaaaactattcatatagggatgggctattagcaagagtatatgaataacgtactataacaagaaaaaatgaattgagaagaaagtagtggttttaagaaggaaaggagaacaaataaattagtgaaacataaggttaagtctatacatattattttctaattgcctattatgtcagactacatgtagttagaaaatacgatgaaagaaaaagccatattataattccaacaaaaagataaaataattaagaataactgcaacaagaaaatataagttctgcaacaataaaactatacaatgaaactaaagagcacaaaaaagaacttaaacagataaaaagcagaccacgtttttggataagaagattaaaaattataaatatatcaattttcactgttaatctataaattcagtgtaatcccaataaaaatgccaacaggttttccccaatagcattgaaatgattttaaaatttaatgaaggccaagcatggtggctcactcctgtaatcccagcactttgagaggccgaggcaggtggattgcctgagtccaggagttccagaccagcctggacaacatggtgaaatcccgtctctatttaaaatgcaagaaattagctgggtgtggtggtgtgcacctatagtcctagctactcgggaggctgaggtgggagaatcacccaagccttgggaggtcgaggctgtagtgagccaaaatcacatcactgcactccagtctgggcagccagagtgagaccctgtctcaaaaaaaaaaaaattattggaaactacgaggcaagaatatccaagaaaaatctagaaaagaagaaacctgagtgagtcagcatgaccaaatattaaaacatcttataaagctacaataattaaaacaatgtggtgctgatatgtggagggtcaatggaacaagatgaaatggccaaaaataaatttaaaatacatgttgaaatgtattaacagcatatgttaaagttaagttatgttaactttatatgttaaattcaagttaattggggaaagatggattattcaatatatgatgaacaactctgtcacccagctaaaaaaaattaagcttgggccatatgccagactagataccaaaataaattccaggaggaccaagtttttaaaagtaaaaatatggaatcatggaagtgcatgaagaagaagtagcacttaaaaaaataataatctcagcatggggaaggtctaagtatggccctcaatcagaaaccaggaaggaaaatattgactattttaaacaaaattatctctgtaccaaaaacagcataaaaggtcaagaaacaacacactggaaaaagaattgcaatgaatatcacagccaaatagttaatttcttattttcaaaaaatagcttctacaaatcgaagagaaaaattctaaggtctcaaaggaaaaatgagcaaaggatttgacaggtggtagaatacagaaaaagaatttaaaatagctcctaaagatatggaaacattactcatgatagcagaagtatcaattgacaaaattactcagattggtaacaaactttaagggggaaagcacttccatgcattgctgtaaattggtacatcttctactgagaacaatccggcagtagttaacaaaattgtgaatgcatatatctctttctctagaaatttctcttttgggaatttattctacatatatattcaaacgtgtgaaatacttctatacaggtgattgaatttcactttattcctaagagcagaagactgcaaaatagtaaatatatacccaaaagggtctaatggattagtttttggcatatcagcacatgataatactatgaagccataaaaaagagagatctctatatgtattgatgggggaccatctttaagatatactgtggtgttgaacaaaacaacatgctgaaaatgtctcttattcttttagaatcaatataagtctgtgcttgtaaatgcagtaagtatctttggaagtatacctaaaaattggtaatagtgtttgactccagggaagaacagatgggtgccagagtgaaaaaaagatagcttttgctttttatgacttttggattctgtaccacgtaataattttgatgtaaattttgctgtgtgtgtttttacttgttcatgtagtgattttataaattactcttttaattttctatcaatgaatatcctgggataaacccctcatgatcataatgaataatgatgtgtggagagtggggagggtttacatatgaaaaatgtagaaaatacaaaaagtgtctatatatacaaaaatgtaagtgttaacatttttatatttgcttcaagctttttttttaaataaaagaaatgcaatattgcaattaaatttgtgttcttctttcttctgtttcacatccaatttatctccccttcctccagaggcagtaactatcatggcttttgtgggtatccttcaggctgttagttttacacacacacacacacacacacacatcagatcacactatcactagtggtggcataagatgaagtgaaggtagaggacaaggtactgggaattccagtttatgaatttagtttcgaaagggatttagtttccatggcaacaatagtcattataaagattgtaaattggcattttcgatagctctaggaagtttagacaacgaaaaaattgagattgaaagaaaaactatccagctgagaatatccatagaaaactggaatgccttgatgacagttttggacaagtccctcatcctctatagatgcagggcagatatgactgagcaccaagccaaggacctaattgtaacggatggtgagttcaatgccaatgaaatctgcaaccacatcacatctctttcagtaagggaaaagcactggtatggaagcagtgggaccttgagacacggcataaggatatttgggcagatactgagaactctggagccccaaatacctttcagacaggcagctacattgtgcctaagaggattatccttccttgccaaaaaaaaaaaaaatgccttctattgactgaatgactgctccccactccataataagagttagatctcgggggtggagccaagatggctgaataggaacggctccagtctacagctcccagcgtgagcaacacagaagacaggtgatttctgcatttacaactgaggtacagagttcatctcactggggagtatcggaaagtgggtgcaggtcagtgggtgcagtgcaccgcgcatgagccaaagcagggtgaggcatcgcttcacctgggaagtgcaaggggtcagggaattccctttcctagtcaaagaaaggggtgacagatggcacctggaaaatcaggtcactcccaccttaatgctgcacttttccaacggtcttagcaaatggcacaccaggagattatatcctgcacatggctccgagggtcctatgcccacggagccttgctcattgctagcacagcagtctgagatcaaactgcaaggcggcagcaaggctgggggatgggcgcccaccattgtccaggcttgaataggtaaacaaagcttccaggaagctcaaactgggtggaacccaccacagctcaaggaggcctgcctgcctcagtagactccacctctgggggcagggcacagccaaacaaaaggagcagaatcttctgcagactaaaatgtccctgtctgacagctttgaagagagcagtggttctcccagcacagagctggagatctgagaatggacagactgcctcctcaagtgggtccctgacccctgagtagcctaactgggaggcaccccccagtaggggcagactgacacctcacacagccaggtactcctctgagacaaaacttccagaggaacgatcaggcagcaacatttgctgttcaccaatatccactgttctgcagcctctgctgctgatacccaggcaaacagggtctggagtggacctccagcaaactccaacagacctgcagctgagggtcctgactgttagaaggaaaactaacaagcagaaaggacatccacaccaaaaccacatctgtacatcaccatcatcaaagaccaaaggtagataaaaccacaaagatggggtaaaaacagagcagaaaaactggaaactctaaaaaccagagcgcctttcctcctccaaaggaacacagctcctcaccagcaatggaacaaagctggatggagaatgactttgacgagttgagagaagaaggcttcacatgatcaaactactccgagctaaaggaggaagttcaaacccatggcaaagaagttaaaaaccttgaaaaaaaatcagacgaatggctgactagaataaccaattcagagaagtccttaaaggacctgatggagctgaaaaccaaggcacgagaactacatgatgaatgcacaagcctcagtagccaatttgatcaactggaagaaagggtatcagtgatggaagatcaaatgaatgaaatgaagtgagaagagaagtttagagaaaaaagaataaaaagaacgaacaaagcctccaagaaatatgggactatgtgaaaagacggggagaatggaaccaagttggaaaacactcttcaggatattatccaggagaacttccccaacctagcaagtcaggccaacattcaaattcaggaaatacagagaacgccacaaagatactcctcgagaagagcaactccaagacacataattgtcagattcaccaaagttgaaatgaaggaaaaaatgttaagggcagccagagagaaaggtcgggttacccacaaagggaagcccatcagactaacagctggtctcttggcaggaactctacaagccagaagagagtggggaccaatattcaacattcttaaagaaaagaaatttcaacccagaatttcatatccagccaaactaaagcttcataagtgaaggagaaataaaatcctttacagacaagcaaatgctgagagattttgtcaccaccaggcctgccttacaagagctcctgaaggaagctaacacataataatcttaaccttaaatgtaaatgggctaaatgctccaattaaaagacacagagtggcaaactggataaagagtcaagacccatcagtgtgctgtattcaggaaacccatctcacatgcagagacacacataggctcaaaataaagggatggaggaagatctaccaagcaaatggaaaacaaaaaaaggcaggggttgcaatcccagtctctgataaaacagactttaaaccaacaaagatcaaaagagacaaagaaggccattacataatggtaaagggatcaattcaacaagaagagctgactatcctaaatatatatgcgcccaatacaggatcacccagattcataaagcaagtccttagagacctacaaagaaacttagactcccacacaataataatgggagactttaacaccccactgtccacattagacagatcaacgagacagaaagttaacaaggatatccaggaattgaactcagctctgcaccaagcagagctaatagacatctacagacctctccaccccaaatcaacagaatatacattcttctcagcaccacaccacacttattccaaaattgaccacatagttggaagtaaaggactcctcagcaaatgcaaaagaacagaaattataacaaactctctctcagaccacagtgcaatcaaactagaactcaggactaagaaactcactcaaaaccgctcaactacatggaaactgtacaacctgctcctgaatgactactgggtacataacgaaatgaaggcagaaataaagatgttctttgaaaccaacaagaacaaagacacaacataccagaatctctgggacacattcaaagctgtgtgtagagggaaatttatagcactgaataaccacaagagaaagcaggaaagatctaaaattgacactctaacaccacaattaaaagagctagagaagcaagagcaaacacattcaaaagctagcagaaggcaagaaataactaagatcagagcagaactgaaggaaatacagacacaaaaaaaatccttcaaaaaatcaatgaatccaggagctggttttttgaaaagatcaacaaaactgatggaccgctagcaagaccaataaagaagaaaagagagaagaatcaaatagacccaataaaaaatcataaaggggatatcagcaccaatcccacagaaatacaaactaccatcagagaatactataaacacctctacacaaataaactagaaaatctagaagaaatggatgaattcctcaacacatacaccctcccaagactaaaccaggaagaagttgaatccctgaatagaccaataacaagttctgaaattgaggcaataattaatagcttaccaaccaaaaaaagcccaggaccagatggattcacagccgaattctaccagaggtacaaggaggagctggtaccattccttctgaaactattccaatcaatagaaaaagagggaatcctccctaactcattttatgaggccagcatcatcctgataccaaagcctggcagagacacaacaaaaaaatagaattttagaccaatatccctggcgaacattgatgcgaaaatcctcaataaaatactggcaaaccgaatccagcagcacatcaaaaagcttatccaccatgatcaagtgggcttcatccctgggatgcaaggctggttcaacatacgcaaatcaataaatgtaatccagcatataaacagaaccaatgacaaaaaccatatgattatctcaatagatgtagaaaaggcctttgacaaaattcaacaatgcttcatgctaaaaactctcaataaattaggtattgatggtgtgaccggaattggtgggttcttggtctcactgacttcaagaatgaagccagggaccctcgtggtgagtgttacagctcttaaggtggcgcatctggagtttgttccttctgatgttcggatgtgttaggagtttcttccttctggtgggttcatggtctctctggctcaggagtgaagctgcagaccttcgacggtgagtgttacagctcttaaggcagcacgtctggagttgttcgttcctccccatgggctcgtggtctcgctggcttcaggagtgaagctgcagactttcacggtgagtgttacagctcataaaagcagtgtggacccaaagagtgaacagtagcaagatttattgcaaagagcgaaagaacaaagcttccacagtgtggaaggggaccccagtaagttgccaccgctggctcaggaagcctgcttttattctcttatctggccccacccacatcctgctgattggtagagcccagtggtctgttttgacagggcgctggttggtgcgtttacaatacctgagctagacacaaaggttctccatgtccccaccagattagctagatacagagtgtccactggtgcattcacaaaccctgagctagacataaaggtcctccacgtccccaccagactcaggagcccagctggcttcacccagtggatcccccaccagggcagcaggtggagctgcctgccagtcctggtgccgtgcgcccgcactcctcagcccttgggtggtcgatgggactgggcgccctggagcaggggatggcgctcgtcggggaggctccggccgcactggagcccacggagggggtgggaggctcaggcatggcgggctgcaggtcccgagccctgccccacgggaaggcagctaaggcccggtgagaaatcgagcacggcgctggtgggctggcagttctgggggacccagtacaccctccgcagccgctggcccgggtgctaagcccctcattcccccgggcggcagagccagccggctgctctgagtttggggcccgccatgcccacgcccacccggaactccagctggcccacaagcaccgcgcacagccctggttcccgctcaggcctctccctccacacctcccttcaagctgagggagctggctctggccttggccagcccagaaaggggctcccacagtgcagcggtgggctgaagggctcctcaagtgccgccaaagtgggagcccaggcagaggaggcgccgagagcaagcgagggctgtgaggactgacagcacgctgtcacctctcaatggggcatatctcaaaataataagagctatctatgacaaacccacagccaatatcatactgaatgggcacaaactggaagcattccctttgaaaactggcacaagacagggatgccctctctcaccactcctattcaacatagtgttggaagttctggccagggcaatcaggcaagagaaggaaataaatggtattcaattaggaaaagaggaagtcaaattgtccctgtttgcagatgacatgattgtatatctagaaaacaccatcgtctcagcccaaaatctccttaagctgataggcaacttcggcaaagtctcaggatacaaaatgaatgtgcaaaaatcacaagcattcttatacaccaataacagacagagagccaaatcatgagtgaactcccattcacaattgcttcaaagagaataaaataactaggaatccaacttacaagggatgtgaaggacctcttcaaggagaactacaaaccactgctcaatgaaataaaagaggatacaaacaaatggaagaacattccatgctcatgggtaggaagaatcaatatcgtgaaaatggtcatactgcccaaggtaatttatagattcaatgccatccccatcaaggtaccaatgattttcttcacagaattggaaaaaactactttaaagttcatatggaaccaaaaaagagcccacattgccaaatcaatcctaaaccaaaagaacaaagctggagacatcacgctacctgacttcaaactatactacaaggctacagtaaccaaaacagcatggtgctggtaccaaaacagacatatagaccaatggaacagaacagaggcctcagaaataacaccacacatccacaaccatttgatctgacaaacctaacaaaaacaagcaatggggaaaggattccctattcaataaatggtgttgggaaaactggctagccacatgcagaaaactgaaagtggaccccttccttatgccttatacaaaaattaactcaagatggattaaagacttaaatgttagacctaaagccataaaaaccctagaagaaaacctaggcaataccattcaggacataggcatgggcaaggacttcatgtctaaaacaccaaaagcaatggcagcaaaagccaaaactgacaaatgggatctaattaaactaaagagcttctgcacagcaaaagaaactaccatcagagtgaacaggcaacctacagaatgggagaaaatttttgcaatctactcaactgacgaagggctaatatccagaatctacaatgaactcatacaaatttacaagacaaaaacaaacaaccccatcaacaagtgggcgaaggatatgaacagacacttctcaaaagaaggcatttatgcagccaaaagacacatgaaaaaatgctcatcatcactggccatcagagaaatgcaaatcaaaaccacaatgagatatcatctcacaccagttagaatggcgatcattaaaaagtcaggaaacaacaggtgctggaggggatgtggagaaataggaacactttcacactgttggtgggactgtaaactagttcaaccattgtggaagtcagtgtggcgattcctcagggatctagaactagaaataccatttgacccagccatcccattactgggtatatacccaaaggactataaatcatgctgctataaagacacatgcacacatatgtttattgcagcactattcacaatagcaaagacttggaaccaacccaaatgtccaacaatgatagattaagaaaatgtggcacatatacaccatggtacacgatgcagccattaaaaaggatgagttcatgtgctttgtagggacatggatgaagctggaaaccatcattctcagcaaactatcgcaaggacaaaaaaccaaacactgcatgttctcactcacaggtgggaattgaacaatgagaatacatggacacaggaaggggaacatcacacaccagggcctgttgtacggtggggggaggggggagggagagcattaggagatatacctaatgttaaatgacaagttaatgggtgcagcacaccaacatggcacacgtatacatatgtaacaaacctgcacgttatgcacatgtaccctaaaacttaaagtatatataaaaaaaagagttagatctcaacatagtccagatgcagaaataaaggcctgttcttgaagagggagcttgtacacaaaaatgttccagatctcatttgtgtgtattggcaggacctgggaggcaagtatgggaatgcatactaaagatgtagatgaaggagaatgaaataaaggcttgatctagctgaaagcattgacgctcaatagggattgaatgtgttggcttgggagtagttgatactctgctagatttggccaactgattttggcttgctgatgccttgactcaatgttggtctacagttaatgagtttgagattccctgacttacgtggcatttggtagaaacttgctgctcaaaatgtgtcatgtggagttgctgtagcagcatcactgggagctatttaaaaatgtagaatctcgggccccatcctagaccttctgaatcagaattttagcaatatttccatgtgcttcatatgcacattatatgttacagtttgagaggcattgttctagaaggagctcaaagactcagggatgtgagaatattgaaatggagctactatgtgcaacacgcttcgacactacccccctagccagaatccccgagcaagcccaggggatgcacctatcaccaaggaattaagacatgcattggagaggaaggtactagcagtgctggagtgaggggggaggcaagaagacacccaggatacaacatttaaccgggcacccaccctccggtactgatcctgaatgcatgagcctgaaagtgaatgcctcctttaatatcttgtgccagggtgcttcactagccgtgggcactggtaaccttgtgaagctttttggtggctgttctctataggccagaaatgacagtggggtatgcagcactggaactggcttcccttatctaaacggaagtagtggaatcctgcagtggtagaagccaggttgcagtcgttattgaacagccgagacaagatggacatattatcccaataaaccgtaggattggagtggtaatctgagtgttttgaccaggagggatccatagtgatgatcatggcatccttacaaattaaatagatgggcagtctactaaaatgtggcttgacatacataggcagaaaaatcccagatatactgggcataaccctatctttagttgtcatggtggggaatcaaaaccccttatccagtttccaaatataaactaatccaaaatcctacaactctttgggaaagagacctttgagaaaaatcctgttacatggctgcagacacattctatgactcttccctcagtccttcatcagagggacctgcagacatttaatagggtgactctgtactggggaaatggaactatcgagggattcctagattctggctctgaatgattctggctctgattctggcagagactgaagtgccacattggtccagcaggcagagggagggcccaaggagccagataatcactggtcctttggttatttctcgagtctggacaacgtatagtagacataggattggaaactgccagaattcccacatcagtttccagatccaaaaagtgagagttattatgttaggaagggccaagtagaagcccctagaattgtactcttcacccacatcaaaatagcaatcttggccgggcgtggtgtctcatgtaaccctaacattttgagaggctgaggtgggcagattgtctgagctcaggagtttgcgactagcctgggcaatgtggcaataatcccatctctactaaaacacacaaaaacttagacgggcatggtggtgcatgcctgtagtctattgcttgaacctgggaggcagaggctgcagtaagccgagatggcaccactgtactccagccagggaaacagagccagactctgtttcaaaaaaaatagcaatcacacattcctgaggggagtttcagagattaatcctaccgtcaacaacctaataggtgcggaagtagtgattcctatcacatcctcacttgacccatctctttgactggtgaaaaagcagatggacatggagaacgccagtgattttcacaaacaggctgtgatgccaatatcacctgctcttctgggttgcagtatctttactggagcaagttaatacagtccctggcacctggtttgcagctattgctggcttctctgctcccccacacaatttctacaagacaaggaaatgagaagcagtttgatctaagtggtggggcaagaggatagtttgccatcttgcttcatgactacctcaattcaaatgcatgctgtcatgatgtaatcaggacaactcttgattattttgctatcccatagggatgacataatgctaattggacctgatgaggaagtatatcaagtgtgccttggatacatgcctgccagagggtaggtgacaaacttcacaggttccagagcctgtcacatcagtggtgtttctggagtttggtaccttgggacaggttgaaacaacatctctaaaagaaagaataacctacgaagctccatgcttgcttggtttatctggattttggacaggctaatccattttctgccaagcagtaagactgctagagaaggaaagttctctctagcaggtccaagttgtggtgtacatgtcccactatttgcacacaatgacccagcagacctaatgatagtgggagactctgcagaagtcagagatctaccaaaatccccaataacagaatccctagagttttggaggaaggctatgccctcttctgccaacaagtactgtccatatgaaatcagtatctcacttcccgtgggaccctgttgagactgaatatctgacaaatatctgtgtgacctgagctcttatcaaatccaaaggggtcatctcttccactaaatcatacacagcagaattcatcataaaatggaactcatatatgtaagactggggcctcataggtctgcaagaaattaataagctgtaacagcaggtggctcagacttgcataggatcaatgtccactgcttcactgcctttctctccacttacagcaatgacctcttggggcacatgaccagctaaaggaggacaaaaaggtgtgggcttggtttgcaaatgaagcttcatgatccataggtctcaacaagagtggatggcttttactctccagctccactcagggataacactgcaagacaatgatgaagggaagtcatctaagtgggtatacacgtttgtgtattttgggtgaaatgatagccatcaccacggacttagaaaccacaggagaatgaaagtttaagtaaccccacccagtaaagaatcccatccaactgaggtgggcaggcagaacttagagagggttgtgggagaaggctgctataactaccaaccgaggccttgtgactagcttcagaagtaggtacaaatacagataggttttattttaccaaaagaaaaactttagacaagttaagtttagcagagtttacttgagcaaagaacaattcatgaattaggcagcatccagaaccaggagacgtccagagagcactccctagcaacatgggcaggcagtatttatagaaagaaaagggtagtgacatacagaaacagcttgattggttgcagcttggcatttaccttctgtggacatggtctgatcacttggcagcctgtgattggctgaagtttggctgctgtgtatgggattggatgggacttggctattcgttacaagactatactcttaagttatgttgcagtttgtttacttactacattaggttacagtttgctatgtatggaggcagctttaggccaaatttagtttaatataaaattgctaattattgatgtttctttctcctctttcccctgtggccttataaaaagaagattggccatggctaacatttttggtttcaaacgaacatttgactgaattgataccatggtagcttaacacactttattgtgttggggacattaactcttcacccagaggaatgataagattggggtaggaggggaatgggggagttggcatgctggacatcctccatttattcctttggcatctattctccatccttctccagcctgctctgggctgcaagaggctgcctggataatatcggtagggctcccttgccatctgaattttggttgcttggtcaatggggacaatggctgaagatgagagggagggaggagagtgaggtgagactattttttttcttctggttctcctcttgcgagtaatgcacgctggctgtgtcccacaactaaagttcctatgatgcagcctcttgacaggtcttttgatctcctggttccagtaacaacttcttcccctcaacagagctgcctgcccctcatcaatagccccaaactatacattatctcctgtggcctccctcttctctgtccacacctttgtaaatagtcccttttgaactcgtctctaattatgcctttgaatgtaccttgtgtttgttaaaggaaaactagacgaattaaatttaacagaatttaattgagaaaagaaggacttgtgaagagattcagagagctctgagcctaaatgtgggcaggcagcatttatagacagaaaacagaagtgaggtatagaaacagcttgcttggttacagcatggtgtttgccttatttggacatagtctgatcagttggcagcctgtgattggctgctgtgattggctgagactcagctagtcgctacaaaaaagataataaaactcctaagttaggctttcagtttgtttgcatagtaagtttggtgcttgtttgttacatatggactcaggtattgaggcatcctcaggtcaaatttagtttaatttaacattgtcctgctaggcctcctgtggatatgccaggttaataatatggacccaggaaagacagcatctagccagcacttctgaaggatgcatatgaggcacctggaggatcttgttacaacacagattctgagtcagtagatctgggattcatctatttctagtggaaaggaaatattctagacccttgctactcaaagtgaagtctttggtctagcagctcctacatcacctggaatcttgttaaaaataatgtcaagcctcacccagaaagaacttcccaatcagcagctggtaagtgcccagctctgcagagctcctttgggagaaaccagaggccccagttcttcaggattttcctggctgtttcccaaaactgctcactcacttttttttttaattttttatttccatgggtttttgggaaacaggtggtgtttggttacatgagtaagttctttagtggtgatttgtgagattttggtgcacccatcacccaagcagtgtacactgaactcaatttgtagtctttattcctcacccccttcccaccctttcctccctgagtccccaaagttcattgtatcattcttattcctctgcatcctcatagcttatctcccacttatgagtgagggcattcgatgtttggttttgcattgctgagttacttcacttagaataatagtctccagtctcatccaggttgctgcaaatgccattaattcatttctttttatggttgagtcatattccatatgtgtgtgtatatatatatatatatatatatatatacatatatgtatatacgtgtgtgtatatatgtgtgtgtgtatatatgtatatatacacacatacatatatatacatatatacacacatataatacacacacatatacacacatatgtatacacatatatacacacacacaccacagtttctttatctgctcattgattgatgggcatttgggctggttcctcatttttgcaattgtgaattgccactcatccttttagctgcttctctttcaattcaagttttcataaaaattcaacagatttttgttgattcactcttctttttcagttctgcttctgaagcatggatagagacaagagtcatataatgaggccagaattctctgtttcttttcttggctactctttttattaggttggtgcaaaagtaaaagcagtttttgccattaaaagtaatgaagaaaagaaacaaaactgtgcttgtttctctgcatctcaccattgctggctaacttttggctatatctttacagttttcatccattttataaaatactgggggagaaggctgggcatggtggtttatgcctgtaatcccagcactttgggaggccgaagtgggcggatcacaaggtcaggagttcaagaccagcctggcctatatagtgaaaccctgtctctactaaaaatacaaaaattagctgggcatggtggcgtgtgccacttgggagactgaggcaagagaatcacttgaacctgggaggcagaggttgcagtgagccaagattgtgccactgcactccagcctgggcaacagagcagtttactttgattctgtttgtctacccttcccctgcctctgcctcttttggcctctccaaggcctgacacagtgcccctctctgtccttcatacccaccctaccccagagactcaggcatttctgcttcctcacggtgggggatatcaagactgagaagtgcctgccctcaggcttcacatggcagctctttcctcagtaggacctccctgacctcccagtctaatttaccaacccctcttaccaagcagacagaccagacagacacactcgtagatactgagagcccttctgttgtactgccttgctttacaatcttttttatctgttattccttgtactcgtatttgttcacatattccaggactttcctgtcgtgtctgcctctggactcccaacaacctagacctgctagtttcacacacaagcaagggcaggagctgcctctttcttcttagatgggaggccttccaatcagttatcacccttcagaatataaagctgtgttctcaccctagaggctggagagagtggaagatcttgtacaacagttgtttcaacccattctatggaaatctttattcaacaagaaagaatgagggagttaatgaatacgggaatataagagacaaataacttacggactgaattgtgttcccccaaaattcgcatgttgaaggttttagggaactaattaaggttaaatgaggtcataagagtgggtccctaatctgataaaactggggcttttataagaataggaagagacaccagagatcagagattccgcacccccaaccccaaagtgcacagagaaaaggccatgtgaggaaacagtgagaaggtggccatctactaaccagaaagacagccctcaccagaaaccaaatttgtcatcatcttgatcatggacttcttgcctccctaactgtgagaaaataaatgtctattgtttaagccagccagcctatggtattcgacgacagcccaagtaacctactacaataaccaaggatcaaagaagaaatcacaaaggaaattagaaaattctttgagatgaataaaaactaaaacacaatgtactaacattaatgggatgcagctaaagcaatgcttatagggaaatttatagctgtaaatgtctatatttaaaaagaagaaaggtctcaaatcaataacctaaacatccaccttaagaaactaggaaaacaagagcaaactaaacctagagcaagcagaaggaagaaaataacagaccagtgcagtaataagtgaaactgagaacaggaatagaggaaattaatgaaactgaaagttgtttctttgaaaagatcgaggaaattaatgaaactgaaagttgtttctttgaaaagatcaaggaaattgacagtcttttagctagactgaccaagaaaagagatgacactcaaattactaaaatcaggaataaaaaaaggggcataatgaatgacattatggaaataaaaaagaatataagggaatattatgaacacttgtacagcaaaaaaaatcagataatatagatgaaagcaacaaattcctagaaagatacaaactattgaaactcactcaagaagaaataaaaatctgaatagacctataacaagtagagagattgaattattaataactagggggaaaatgcccaacaaacttcccacaaagaaaagcacagatggcttccctggtgaatttcatcagaccttaaaaaagaattaacaccaattattcataaatttttcttaaaaacagaagaaaatggaatactttccaactcattctatgtagccaatattactctgatactaaagacagacaaagatatcacaagaaaataaaattacagaccaatataccttgcgaatatacatgcaaaaatcctgaacaaaatactatcaaaccaaagacagcaacatataaaaaggagtataagtcatgaccaattgagatttatcccaggaatgtaaggttgggcttgacatacaaaatcaatgtaatacatcatattaatagaataaaagacaaaaaccccatgatcacatcaatatatacagaaaaaaacttgacaaaatacagtgtcctttcatgataaaaacactaaacaactaggaatagaagaacatctcctcaacttgataaaggccatctactaaaactccacaaccacaccaaacttaatggtgaaaaactaaatactttccctctgagatcaagaacaagactataatttctgctctcgccacttccattcaacatggtactggaagttctagccaggataatttggcaagaaaagaaaataaaagacacctagagtgaaataaaagaagtaaaactatctctatttgcatatgatatgatataaaaactaaagtatccagttggaaactattataatgaataaatgagttaaataaggtgcaagatgcaagatctggttacaaaaatcagttgtatttctgtgtaatagcaatacaaaatttgaaaataaaatttagaaaacaattccatttatgaaaacatcaaaaataataaaatacttaggaataagagaaatgtaagatttgtccatcagccgagcgtggtgactcatccctgtgttcccagaactttgggaggtcgaggtgggtggatcgtttgagcccaggagtttgaaatcagcttgggcaatattacaaaattccgtatctgcagaaaatacaaaaaaattagccagacatggtggcgcatgcctgtagtaccagctacttgggaggctgagatgggaggatcactcgagcctaggaggttgaggctgcagtgagccgtgatcacatcactacactccagtctgggcaacagagtgagaccctgtctcaaaaaaaaaaactgtccattgaaaactatgagatatcatttaaaggaattaagcaaatggaaaaatattccatgttcatgaattggaaggtttaattttgtcatgatggcaatactctccaaatggatctatagagtcaatgtaatctctttcaaaattccagcttctctttttgcagaaattgataacatgatcctaaaattcatatggaaatcaggggatccataatagtcaaaataatcttgaaagagaacaaatttagaggattcactcttcttgattcaaaaatttaaagcagtgtggtattgcatgagggtagacacataaatcaatggaatagaactgaaagtccagaaataaatacatttatgatcaactgattgttgacaagagcgtcaggttaattccatgtgaaaaagactagtcttatcaacaaatagtgctgagacaactggatatccacatgcaaaagaatcaagttagacctatatctcatattgtacacaagaaaataactcaaactgactcataggcttacttgtaagagctaaaattataaagctcttagaataaaacataggagcaaatctttgttagcttggatgaggcaatgatttgttagatatgacaggaaaagcacaagacgggaaaaaagatgaactgtactgcattaaaattcaaattttttgtgtgtttcaagggacatcattaagaaagtgaaaagatagccaggtgcagtggctcaagcctgtaatcccaacactttggaagactgaggtggaaagattgcttgaagccaggaatttaagaccagcgtgggcaacatagaaagaccttgtctccataaaaaataaaaattaaaaattatctggatgaggctgtgcacacctgaagtcctggctactcaggaggctgaggtaggaagatcttgaggagttagaggctgcagtgagatatgattgcaccatcgcactccaacttgggtgatagagaccctgtctctaagaaaacaaaacaaaacaaagaaccagtgcttcaaaaagttatatgactcagcaaggaaagcaaaaccatatgtcctcagaaaaatttgtacacaaaaattcatagcagcattattcataacagtctgaagtggaaacaatccaaacatcaatcaactgatgaatggatgagcaaaatgtggtacacaatgaaattctcccatacaaaaaggtgaagtactgatacgtgctacgacagataaactgtgaaaacattatgctaagtaagtgaaagaggccagacacatattgtatgtatttatttatataaaacatccagaaaaggcaaatccataggaacagaagttagattagtggttgccagggactgaaggtagggaaagggagattgaggagtgactgctctgggtatgggggtttcttgttggggtactgaacgtgttctggaattagatagtgaagatggatgcacgactctatgaaaatactaaaaatcccagagttgtatactttaaaagagtgaacttaatagtatgtaaattgtatctcaatacagctgttattataaataaataaatatgctttgtttctcaaaaagcattttttttgttgttgtttgtttatttttttttagcagtggggctgtggacctgggtccagagtatggaatgatgcaggttggaggggccatcccacgcacgctagtaaagttagtgaacatgaatgaaacatggaagtgtatgtgtcttgattatggtcttcactctgggatctgagagaaacacacagctcctcagtggttcagacttgcaaataatttatcttgagtcttatcagcttacagccacctaaaacacgaagctatgctaatgttccctgtgatagccttgtttgggtttagaaaattcttatgtggccagttgggatctgaggtataaatctactcttaaataaacagcaggaattgcctttaaagacttgctccaagacaaatgaagaatttgtggcttacctgatgtagttgtgactatgaagatcatggaaaagattaagaatgtgctttactgtggcaacattcttggcatttgtggaaatttgcttttgagtaaatttattaggtaagcaatttgactgcgatgatagcaaataaatattattacttatttgctatccatttcattttcctaaataacttagagagggattctttctggtttcattggtaaaagtaatgttacatattctcaatacattgcagtttagtatttaactttgcttctttgttaactgggaaagcatgacttggtttctaaaaattttaacagaatgaaaaacatctgccaggcagtgatacaaaaattcttcatgaatcatctcaatagatgcagaaaaagcatttgataaaagtcagcaccctttcatgatacaaatcttcaacaaacttcagaagaactaccttaaaataataaaggccctatacaacaaacccacagccagcatcatactgaataggaaaaagttgcaagcattccctctaagaactggagcaagacaaggatgttcattctcaccactcctattcaacatagtgctgaactcatagggcaatcaggcaagagaaagaaataaaaggtatccaacttggaaaagaggaagtcaaattatctctgttcactggcaatataaccttatatctagaaattgctaaagacttctccaaaaagctctagatctgataaatgaattcagtaaagtttcacaatacgaaatcagtgtacaaaagtcattagcatttctctgcattaataatgatcaagcagagaaccaaatcaagaaggcaatcccatttaacatagctacaaaaaatgaagtaaaataaaataaaatgcccaggaatatatttaaccaaggagataaaagatctttacaaggaaaactacaaaacactgatgaaagcagttgtagatgacacaaacaaatggaaaagcatcttattctcatggatcagaagaattaatgtcattaacatgaccatactgcacaaagcaatctacagattcaatgcaatatctatcaaaataccaatgttgtttttcgcagagttggaaaaaaacaatcttaaaattcacttggaaccaaaaaagagcccaaatggctaaagcaatcctaagcaaaaagaacaaactcggaagcaacacattacctgatctcaaactatactacaaggctatggtaagcaaaacaccatggtactggtacaaaaatagacatatagattaatggaacagagaactcagaaataaagccacacacatacagccaactgatctttggcaaagttgacaaaaacatacactggggaaaggatccccttttcaataaatgatggtggggaaattggattgccacatccagaagaatgcaactggactcctatctctcacgatatacaagatggattaaagactcaattataagacgtgaaactataaaaattctagaagaaaacctaggtaaaactcttgtggacattgatctaggcaacgaatttatgactaaggcctcaaaatcacaagcaacaaaaacaaaaatagacaaatgggacttaaactaaaaagcttctgcacagaaaaaaaaatcaatagagtgaacagacctgcagaatgggagaaaatatttgcaaactatccattcaaccattcaacaggggactggcatccagaatttgtgaaaaactcaaacttcaacaacaataacagcaacaacaacaaaagtgggcaaaggatttgaatagacatttttttaaagaagacatacaaatgaccaacaagcatataaaaaaattttcagcatcactaattgtcagataaatgcaaatgaaaaccacaatgagatatcatcttacatgagtccgaatggttattactaaaaagtcaaaaaataacatatgttggcaaagatgcaggtcacatttctgacccctccaagagcagctgaaacaactgttgcacagaaccttcaactctttccagcctccagggtgagacacaactgtatattctaaagggtgataactgattggaaggctttccatctaagaagtttcatacacaggctcctaccccagcctgtgtatgaaactagtagatctaagtgctgggagtccagaggcagacatgacaggaaagttctggaatatgtgaacaaacatgagtacacggaatggcagagcatgaaaagggataatagggttgtaaagcaaggcagtacaacagaaaggctctcggtatctgtgaatgtgtgtctgtctggtttgtctgtctggtaagaggagttggtacattagactgggaagtcagggaggcctcagtgagcaaaaagctgccatgtgaaaccctagggcaggttcttctcagtcttgacattcacactgtgattgagtgtggatatgaaggatgggacgggcggggcgggcattgtgtcaggtcttggagaggccaagagaggcagaggcaggggcagggtagaaaaacagaatcagagcaaacattgtcagttgcaaattatcacttttgcaacactgaattttcttgtttttctcccctttccctttccttggctggttagttaatatatttttatagcgcccttttctttcctttgcatgattgtgaaatcttgctgtttacctctacttttaacaccatccttgtaaagtcccacagtcctcacagtggtcaggctgcatcagcataatggaaaaaacaatatttctccttgatttaactttggagagagtctgacagaaggagtgagtgctctcaaatgccttcagttctgctgagtccttaggagtccagttaggccttcctgggccatcactgcttgaagcccaattatgtgatttgtcacatcttcctctagactatactcatgcctaaagaatctccatccttgaaactcccatttcctgcgttaatttccaggaaatggactcccttcaaggatcctcagaaagaatctaaaaaagggtccttgaaggcagttaatttctggttaaataaaacatctgccatcttttcagaatatagacttttccttcttaccataaaaaacgtgagcttgttctgggcagtgatttctttgctaggtcccaaaagtacaggcaatgaaaacaataatagacaaatggtattgcatcaaacaaaaaaaactactgcacagcaaaggaaataattaacagagtgaagatacagtccacggattgggagaacatatttgcaaattatacagcataaaatgggctaatatccaaaatatacaaggtattcaaatgactcaatcgaaagaaacaaataacttgattaaaaactgggcaaacaatgtgaatacacatttttcaaaatacacacaaatggccaatagatatttggaaaaatgctcaatattactgatcagggaaatgtaaataaaaccacaataatatatcacctcatgctgttagattgactattacaaaaaagatgaatgaaaacaagtgttggagaggatgaggaaaaaagaaaactcttgtacactgttggaggaaatgtaaattagtacagtcattgatatggtttggctgtgtccccatccaaatctgagcttgaattgtatctcccggaattcccacatgttatgggagggacccagggagaggtagtttaatgatggaggccgtcttttcccatgctattctcatgatagtgaataagtctcatgagatctgatgggattatcaggggtttcctcatttgcttctagctcattttctcttgccaccaccatgtaagaagtgccttcacttcccgccatgattctgagatttccccagccatgtggaactgtcccaataaacctccttttcttcccagtcttgggtatgtctttatcagcagcatgaaaacagactaatatagtaaattgttaccagtagaggggtattgctgaaaagataccagaaaatgtgaaagtgattttggagctgggtaacaggcagaagttggaacagtttggaagccccagaggaagacaggaaaatgtgggaaagtttggaacttcctagagacttgttgaatggctttgaccaaaatgctgatagtgatatggacaataaggtctaggctgaggtggtctcagatggagatgaggagcttgttgggaactggagtaaaggtggatcttgttatgttttagcaaagaggctggtggcattttgcccctgccctagaaatttgtaaaactttgaacttgagaaagatgatttagggtatctggtggaagaaatttctaagcagcaaagcattcaagaggtgacttgttaaaggcattcaatttcataacagaagcagagcataaaagtttggaaagtttgcaacctgactatgcaatagaaaagaaaaccccattttctggggagaaattcaagccagctgcagaaatttgcataagcagtgaggagcctactgttaatccccaagaccatggggaaaatgtctttaggccatgtcagagaccttcacagcagcccctcccatcacaggtctggaggcccaggaggaaaaagtagtttcctgggctggacagaggatccctgtgctgtgtgcagcctagggactttgacagaacaggagcatcaccatcttggacaaacaccaccattctaaagttccccttaatcaaaaaccacctaaatccacagggcatcagcctaaaggctaaggccagcatgaccataaaccataaatgacatctctgaccagaaacatttcaaccataagataaacccctccccagagagatgtcagccccaagacaacctcccctcctaccagagacattccaaacccacaataaacttcttccccacaaagaaacattccaagcctatgataagctctctcaccctaaaatcaacaaatacgcttaatctgtaagagagtgtgctcctgaccaaaatcagccagaagcccctctcaggtttattctccaaaataaacctgtctttgactggtgagtcacttttcgtgtttctttcctctttctttaactcttacatttgctgccaaaactcaggatgggtgctgggggtagaggttctcctgcaacccaaaaagcagtggacagcagctgctcatcctgctggatcctgagagtctctggccacccatcttgtcttgtctctcacttcacttttctagcaatttgtctgaggaggacaactaacctgaaggggactgtgaggctcaggctggggcaaatctccagtgaaccctcaaagccctcaggtcttaggaatccacctctggctgcccacaatgggtattttgctctcttccctcctccctcatcctcttctctctctctctctctctctctctctctctctgtctctctctccctctcttccttgtgaagctctagtccaaggggccctttgccaattccaatcagaacatccaacatcggacactaatccagctgactagtaagatctgccctctcctgactttctcacagcacctgggagagtcaggtcagctgtcccggtcctcagaggaccagtgggactaagctagaagaaatcttggagatgcccagtttcttcgcagcttgatcatcctctttataaagaggattccaggtttctgtcttttatctgtggatgcctagaacaaaaacagacaccttcagcttcctcttaccagtccacatgggtgccaaacaatcccactttcctaagtcctctccattgggctgtctccttcacaatgttgctaagcttggcttaaaggaagcataaagccaaagagtatgcttttttattgcaacatggcctggccccaatacaaattagataatgacagctggtagcctgaaaatggcacctttgactttcaaattctcagggaccttgacaactttataactaggaacagcaaatggcaggaggttccctatattcaggctttcttttactttagatcccaaccctccctgtgtcaaacttgcacccctcatgaagtctttcttcttaatgataaccttccccaggtctctcctttctctgaaactccttcctccaaaacccctttgaccctgcagatgaaccccctccatattcttatccccctgcatctgctcctcaacctatctgaatcctccacttcagtgacgcctcctgcccgcaagctttcagctccaaaccctgctccttctccttctccatctgttacccattcaaaaactgctccaaccagtcaaaccaccctgccattctccgtctccaggaagtggctgcggttgaaggcattgctcccattcatgccctttctccacatctgatttgtcgcagatcaaacagtgcctgggatctttctctgaaaatccccctgactagtgcagggaattcctgcacataacccaatcctttaatttaacatggcatatttatataattctaacctccaccctcacccctgatgaaaaacagctctcaatttaattaaaatgaatattcaagctatgagtatattcaaaaggcctttatgtttttctcttcataaatcttgttttcctggaaaaggtttttttccccagtcaactgaattacttttctccactctgtcttaccactcttggtgcatatatgaaaaatcccaaaatgacttctggtggcctgggactccttgggaaaacagaaaagctgccacaaatcccgttttgggaaaaaatctgttttccttatggaacccctggaattaaagatgaataagtacctctcaaaatctgtctttgtcttccagctatgcttgtttattaggccctggaaactgttttcatagccctgttcttaaagggtctcacccaaaggccagtgatccaattgggaaaggggcaaaaaaaaaaaaaattctaattactggatcttcttctggttgtctgtgtggctatgtatgtgttatgtgtgcaatgcctatttaaaaagctctaattaattgacctaagaaaaataagcacttaaatcaaatatttttaacagaaaagtaaaagctgtgggacctttcagttcatgtgactttaatctttaaaacttactagtacagtaagattagaaatgtcttaaaagtttccagcatacatttttgtttgcatttattaatcaagcaatttcatagttatctctgccaaatactataagatgtgaaaattttgcatagaggccacaaaactataactcagcccaaacagaataatctttgcttctgtaattttttaatcaatgaaacattaatattggtttaataaagatagctacatcttgaactatttagtgaaataccctaacttctaatcttgatattaaagaaaaaagaatttatggccaggcacagtggctcacgcttgtaatcccagcactttgggaggccgaggcaggtggatcacgaggtcaggagattgagaccatcctggctaacatggtgaaaccccgtctctactaaaaatacaaaaaattagccaggtgtggtggcaggtgcccatagtcccagctactcgggaggctgaggcaggagaatggcatgaacccaggaggcagagattgcagtgagctgagatcgcgccactgcactccagcctgggtgacagagcaagactctgtctcaaaaaaaaaaaaagaaaaggaaaatttatataaaaaagaatcttatatggtaaattcttgtcctaaagtaaattaactggttgtttaaggagagggatgtttacaagtcagaaagtcaaggcatgtcagagattgtctgtgtaagtcatgaaaaattttataaaagggagagtatggacaagatggatgaataggaacagctctagtctgcagctcccagtgagatcagagcagaagtcaggtgatttctgcatttccaactgaggtacatggctcatctcactgggactggttggacagtgggtgcagcccatggagggtaagccaaagcaggatggggcgttgcctcttctgggaagcacaaggggtcagggaactcccacccctagccaagggaagccatgagggactgggccatgaggaatggtacattctggcccagatactatgctattcccatggtctttgcaaccttcagaccaagaaattccttcgggtgcctacaccaccatggccctggatttcaagcacaaaaccaggcagccatttgggcagacattgagctagctgcaggagtttttttcataccccagtggcacctggaacccagcaagatagaaccattcacttccctggaaagggggctgaagccagggagccaaggggtctagctcagcagatcccaccccccatggagcccagcaagctaagatccactgccttgaaattctctctgccagcacagcagtctaaagttgacctgggatgtgtgagcttggtggggggaggggggtccaccactactcaggtttaagtaggtggttttcccctcacagtgtaaacaaagcctctgggaaattgaacttggtggagcccactgcagctcagcaaagctaccgtagctagactgcctctctagattcctcatctctgggcagggcatctctgaaagaaaggcagcagccccagtcagggccttatagataaaactcccttctccctgggacagagcacatgggggaaaggggcagctgtggccacagcttcagtggacttaaactttcctgtctgccgactctgaagagagcagcagatctcccagcacagcactcgagctctgctaaaagacacattgcctcctcaagtgggtccctgacccccgtgcctcctgactgggagacacctcctagcaggggtcaacagacacctcatacaggagagctctggctggcgtctggtgggtgcctttctgggatgaagcttccagaggaaggagcagggagcaacctttgctgttctgcagcctccactagtgatgcccaggcaaacagggtctggagtggacctccaggaaactccaccagatctgcagcagaggggcctgactgttagaaggaaaactaacaaacagaaaagagtagcatcaacatcaacaaaaaggatgtccacacaaaaactccatccaaaggcaaccaacatcaaagaccaaaggtagttaagtccacaacaatgaggaaaaaccagcgcaaaaaggctgaaaattccaaaaaccagaatgcctcttctcctccaaaggattagagctcctcaccagcaagggaacaaaactggacagagaatgagtttgatgaattgacagaagtaggcttcagaaggtgggtaataacaaactcctccgagctaaaggagcattttctaacccaatgcaaggaagctaagaaccttgaaaaaaggttagaggaattgctaactagaataaccagtttaaagaagaacacaaatgacctgatggagctgaaaaacacagcatgagaacttcatgaagcatacacaagtatcaaaagccaaatcagtcaaatggaagaaaggatatgagagattgaagatcaacttaatgaaataaagtgtgaagacaagaatagagaaaaaataatgaaaagaaatgaacaaagcctccaagaaatattggactatgtgaaaagaccaaacctacatttgatttgtgtacctgaatgtgacggggagaatggaaccaagttggaaaacactcttcaggatattatccaggagaatttccccaacctagcaaggcaggccaacattcaaattcaggaaatacagagaacaccacaaagatattcctcgagaagagcaaccccagacacataattttcagattcaccaaggttgaaatgaggggaaaatgttaagggcagccagagagaaaggttgggttacccataaagggaagcccatcagactaacagcgaatctgtctgcagaaaccctacaagccagaagggaatgggggccaatattcaacattcttaaagaaaagaattttcaacccagaattttatatccagccaaactaagcttcataagtgaaggagaaataaaatcctttacagacaagcaaatgctgagagattttgtcaccaccaggcctgccttacaagaactcctgaaggaagcactaaatataaaaggaaaaaccagtaccagccactgcaaaaacatatcaaattgtaaagaccatcaatactatgaagaaactacatcaactaatgggcaaaataaccagctagcattaataatggcaagatcaaattcacacataacaatattaatcttaaatgtatatgggctaaatgcctcatttaaaagacacagactggcaaattggataaagaatcaagacccatcagtgtgctgtattcaggagacaaatctcacatgcaaagacaaacataggctcaaaataaagggatggaggaatatttaccaagcaaatggaaagcagaaaaaaaagcagtggttgcaatcctagtctctaataaaatagactttaaactgacaaagatcaaaaaagacaaagaagggcattatatagtggtaaagggatcaatgcaacacgaagagctaactctcctaaatatatatgcacccaatacaggagcacgcagattcataaagcaagttcttagagatgtacaaagagacttagactcccacacaataatagttggagtcttttacaccccactgtcaatattagatagatcaatgagacagaaaattaacaaagaaattcaggacttgaactcagctctggaccaagtgaacctaatagacatccacagaactctccaccccaaatcaacagaatatgcattcttctcagcactacatcacacttattctaaaattgaccacataattggaagtaaaacactcctcagcaaatggaaaagaatggaaatcatagcaaacagtctctcagaccacaatgcaatcaaattagaactcaggattaagaaacttactctaaaccacacaactacatggaaactgaacaacctgcttctgaatgactactgggtaaacaacaaaattaatgcagaaataaataagttatttgaaaccaatgagaacaaagacacaacctaccagaatctgtgggacacagctaaagcagtgtttagaggaaaatttatagcactaaatgcccacaggagaaagtaggaaagatctaaaatcaacaccctaacatcaaaattaaaagaactagagaagcatctggccccaccaaagtgttaaaggcgcaccggaaagagaacataaactccgcgagctaggcaccaaaactatgtcccttacaagcagtaggaggagaatttgggcccattcatgtgcatgcccccttctcactctcagatttaaaacgaataaagagcagaaaacaaataaaggcagatttagggaaattctcagataatcctgataactatatataggtcctgcaaggattggggagtcctttgatctaacatggagagctatcatgttgcttcttgatcagacattaagtcctactggaaaagaagcagctttagcagcagctcagcaatttggggatctgtggtaccttagccaggtaaacgatcgaatggcccaggaggagagggaaaaattccccacagggcaagaggcagtccccactgtagaccctcattgggatactgactcagatcatggagattggagccacaggcatttgctaacttgcattttagaagggttgaggaagactaggaaaaagcctatgaactatttaatgctatccacaattacacagggaagagaggaaaacccctcagcttttctagaaaggctaagggagtccctaagaaagcacacctccccaactccagattctgtagaaggccaacttattttaaaggataaatttatcacccaatcatggctgactttaggagaaaactccaaaagtctgctttaggcccagaacaaaatttggagacgttattaaacctggcaacctcggtgttctataacagggaccaagaggaacaggccaaaagggaaaagtgagataagagaaaggctgcagccttagtcatggccctcagacaggcagaccttggtggctcagagggaaccaagagaggagcaggccaattgcctagaagggcttgttatcagtgcggtttacaatgacactttaagaaagattgtccaaccaaaaacaaaccgccccctcgcccatgtccaatatgccaaggcaatcactggaaggcacactgccccaaaggatgaaggccctctaggccagaagcacccaaccagatgattcagcaataggactgagggtgactggggcaagtgccagctcatgccatcaccctcacagagccctgggtaagtttgaccattgaaggccaggaagtggacttcctcctggacactggtgcggacttctcagttttaatctcctgccctggacgactgtcctcaaagtccgttactatccgaggaatcttaggacagcctataaccaggtatttctcttgccttctcagctgcaactgggagactttgctcttttcacgtgcatttcttgttgtgcctgaaagtcccacacctttattagggagggacacattagccaaagctggggccattatccatcccagtcctaaacaccaccaaatcagtcccataatccccaatttaccagccacacaggcctcaaatctcacatgcataaacttcagcatggctctcaataagaacacctcccaatgtcagtcctggatatcaataacctcaggtttcacctgtctaacttcaggcatttttttcaactgggataacacagcctatcaatgcctaaacggcattcggaaagaactatgctttctctcctttctagcacctcctatgtccatatatactgaacaagagttacaaagtctccttataccccaatctcgccacacatgagcccttattgtaggagccggaatactgggtgggcttgggactgaaattggaggcataacctcctccacccaattctattataaattattacaaaaattaaaggatgacatggaactagttgccaactccctagtgaccctacaaagccagcttaattctctagctgcagtagtccttcaaaaccagagagccctagacttactaacagctgaaaggggagaaacctgcctcttcttaggagaaaaatgttgctatttcattaaccagtcaggaatcattactaaaaagtcaaagaactaagaaaatgaatagaaagtagaaaaaaaggagcttgaacactcagggccctggaatatgtttaaccaatggataccttggctcctccgctttctaggccctgcgacagccatcctactattattcgcttttgggccttgcatttttaacctccttgtcaaatttgtttcctccagaatcaaggccatcaagctaccaatggtcttataaatggaacctcaaatgagttcaactcacggcttctaccgaggacctgtatcgacccactggtccctcactagcctaaaaagttcccctctggaggacaccacaactgcagggccccttcttggcccttaatcagcaggaagtagccagaaccaccaccgcccagttcccaacagcagttggggcgtcctgtctagagggggagctgagaggaggtgcccactgggcttcctgggttgagtaggggctcagaaagctgtgaaactcactcatttcctgcatcaggacttactttggtcctggatgaataatattgaagatatatgcttaaaatattcctaacatcagaatttgcacacgtgtttttttccccaagaaagctataaacagcaaaaattttgctgtgagcttccctgtgtcctctctccctctctcccctcttcctcccctgaaactaaaaggaatgttaaaagcccatttttctgtgaccagcagaccttagctatgcccccaattccaattccttgtaaacacaatttgtaaaatcctgtgagatcctgtctcctttgccatgccactgcaaggttataaagtcgataaaacttaagttacaattccggtttttctcaagatccgagacatgttaattgtctttgtttctcgctctggtaacatcttccctctgcatgtatttctcaccttaaagactctaagaggtgatcaaaaaatctaacactggctacccgctcgggactccttccatgctgtagaagctttgtactgtcactctgcttaataaagcctatagctttttttctctcagtccaatccttgtctctctctcaccacgagctgccgccacaccaaatctttggcgtggctaaggcaagaacctttggcattacaaatctaggagctggttttttgaaaagattaacaaaatagatagatggctagccagactaataaagaagaaaagagagaagaatcaaatagacacaataaaaaatgataaaggggatatcaccaccgatcccacagaaatgcaaactaccatcagagaatactataaacacctctgtgcaaataaactagaaaatctagaagaaatgggtaaattcctggacacatatgccctctgaagactaaaccaggaagaagttgaatccctgaatagaccaataacaagttctgaaattgaggcagtaattaatagcctaccaaccactaaaagcccaggactagacagattcacagctgaattctaccagaggtacaaagaggagttggtaccatttcttctaaaagtattccaaacaatagaaaaagaaggaatcctccctaactcattttatgaggtcagcatcatcctgataccaaaacctgacagagacacaacaaaaaaagaaaatttcaggccaatatcccagatgaacatcgatgctaaaatcctcaataaaatactggcaaacagaatccagcagcacatcaaaaagcttatccaccacgatcttgtcagcttcatccctcagatgcaaggctagttcaataaacacaaatcaataatcataattcatcacataaacagaaccaatgacaaaaaacacatgattatctccataaatgcagaaaaggtcttcaataaaattcaacaccccttcatgctaaaaactctcaataaactaggactgataaaacatatctcaaaataataagagctatttatcacaaacccacagccaatatcatactgaatgggcaaaaactggaagaattccctttgaaaaccagcacaagaaaaagatgccctgtctcactactcctattcaacatagtattggaagtctggccaggacaatcaggcaagaaaaagaaataaagcatattcaaataggaagagaggaagtcaaactctctctgtttgcagatgacatgattgtatatttagaaaaccccatggtctcaaccctaaatctccttaagctgataaacaatttcagcaaagtctcaggatacaaaatcaatgtgcaaagatcacaaacattcctatacactaataatagacaaacagagagccaaatcatatgaactcccattcacaatcactacaacaagaataaaatacctaagaatacaacttacaagggatgtgaaggacctcttcaatgagaactacaaaccactgctcaaggaaatgagaggacacaaacaaatggaaaaacattccatgctcatggataggaagattcaatatcataaaaatagccatactgcccaaagtaattcatagattcaatgctatccccatcaagctaccattgactttcctcatagaattagaaaaaactactttaaatttcatattgaaccaaaagagagcccatatagctaagacaatcctaagcaaaaagaacaaagctggaggcatcacactacctgacttcaaactacactataaaggtacagtaatgaaaacagcattgtactggtgacaaaacagatatatagacaaatgaaacagaacagatgcctcagaaataacgttacacatctacatccatctgatctttgaccaacctgataaaacaagcaatggggaaatgattccctctttaataactggtgttgggaaaactggctagccatatgcagaaacctgaatctgcactccttccttacaccttatgcaaaaattaactcaagatggattaaagacttaaatataaaacctaaaaccataaaaaccctagaagaaaacctaggcaataccattcaggacataggcatgggcaaagacttcatgactaaaacaccaaaagcaatggcaacaaaagcgaaaattgacaaatgagatctaattaaactaaagagcttctgcacagcaagagaaattattgtcagagtaacaggcaacctacagaatgggagaaaatttttgcaatctatccgtctgacaaagggttgatatacagactctacaaggaactgaaacaaatgtacaagaaaaaaaaacccatcaaaaaatgggcgaaagatatgaacagacacttctcaaaagaagacatttatgtagccaacaaatgtatgaaaaaaaagctcagcactgggcattagagaaatgcaaatcaaaaccacaatgagataccatctcatgctggttagaatggcaatcattaaaaagccaggaaacaacagatgctggagaggatgtggagaaataggagcgcttttacactgttggtgggagcataaattagttcaaccattgtggaggacagtgtggcgattcctcaaggatctagaaccagaaataccatttgacccagcaatcccattactgggtatatacccaaaggattataaatcattctactataaagacacatgcactcgtatgtttattgcagcattattcacaatagcaaagacctggaaccaacccaaatgcccatcaatgatagattggataaagaaaatgtggcacatatacaccatggaatactatgcagccataaaaaatgaagagttcatgtcctttgtagggacatggatgaagctggaaaccatcattctcagcaaactaacacaagaacagaaaaccaaacaccacatgttctcactcatagtggaagctgaacaatgaaaacacatggacacagggaggggaacatcacacaccagggcctgtcagggggtgggggcataggggagggatagcattagtagaagtacctaatgtaggtgatgggttgatgggtgcagcaaaccaccatggcacatgtatacctatgtaacaaaactccacattctgcacatgtatcccagaacttaaagtataataaaataaataaatatataataaataaataaataaataaaaagcaagactcaatgatctgttgcctataagaaacatgtttcacccatacagatacacataggccgaaaataaagggatggaaaaagatattctatgctaatggaaaccaaaaaagagcaggagtagctatacttgtgtcagacaaaatagattacaagacaaaacttttggccaggtgcagtggctcatgtttataattccagaactttcagaggcctagatgggcagattgcttgagcccaggagtttgagaccagcctgggcaacatggcaaaacctcatctctatttaaaatagaaaaaccactcaggtatggtggtgcatgcctgtagtcccagctagtcaggaggctgaggtgggaggatcacttgagcctgagaaacagaggtttcagtgagccaagatcacaccggtgcactccagcctgggtgaaagagcaagaccctgtctcaaaaaaaattaactttttgttgtttttattcatcttattgtactgactatgtcttgaaaagttggtttttactatatttgtttatcatttaatctttctatttaagataagagtagtttacacggcacagttacagtgctatactattctgtgtttttctgtgtactttctattgccaatgagatttgtaccttcagattattttttctcattcattaatgtctttatttctgattgaagtactgcctttcacatctcttgtaggactggtctggcgtttatgaaatccctgtttctgtatgtctcggaaagtcttatttctccttcatgtttgaaggatttttcacctgatatactattctagggtgggtgtttttttccttcagcactttaaatatgtcatgccagctctctcctggcctgtaaggttgaaatgtctgctgccacacttattgggattccattgcatattatttttttcttttcttttgctgcttttgggagcttttctttaaccttgagctttggaaatttgattattacgtgccttgaagtagtcttctttaggttaaatctgctttgtgttctataaccttcttgtaattggatattgatttctttctctgggtttgggatgttctctgttattatccctttgaataaactttttacccctatctctttctctagctcctctttgtccaatttccactctgtgccttttaagtggaacatttagaccatttacattcaacgttaatatttatatgtgaggtttttaatcctgttgtgatgttgttagctggtttctttgtagtcccgatttgtgtagttgctttataaggtctgtgaactatgtataatacttaagtgtgcttttgtggtagcaggcatcattctttcatttccatatttaaaactctcttaggatatctcgtaatgctagtctagtggtaaaaaataaggtcctttaacaattgcttgcctggaaaatattttatttcttctttgtttatgaagcttagtttgggaagacatcaaattcctggttggacttccttttatttgagaatactgaaaataagtactcaatctcttctcatttgtaaggtttctgctgagaagtccattgttagcctaatggggttcccttgtaagtgatctgacatttttctctaggtgtcgtttaacattttttctttagtattgactttggatactctggtgactatgtgccttggtgacatttgtcttgtatagtatcttgcaggtgttctccaggtttattgtgtttggatgtctacctctctaacaagattaggaaaacatttttgaattattccttcaaataagttttccagctgtttactttttcttcttctctcaggaattccaatcttttgtagatttggttgcttaacataatcctatgtttctaaaaaattttactcatttttaaacaattctttatttctgtgtgactgagttagttagaaatattggtcttcatgctctgaaattcttccttgtgcttgatctagtctgttgatagagatttcaatagtattttgaaattctgtaagtgagtttttcaatttctgaagatctgataagttttaaaaagatgcttatctcttccttcattttctggattgctttagtagtttccttgcgtcgattttcagccttgtcttggatctcgttgagctgccttgcaatccatgctttgaattctctgtcatttctgagcttccttttttgttagggtccattggtggagagctagtgtaatcttttggtggtgtcacaacattcagatttttcatggtgctggaattcttacactgtttccttcttatctggagaggctagcacttctaatttttgtaattaatttaatgtggaaagaattttttttctttgcctttctcccccaccccatctctagcagggtatagctacagagtatgttgagtagggccttctggctttgcttctgtaaccctatgcacttctgttggcaggttttacactgggctgtgatatttgatctacaggccagtagatggcgcttaagggtaattgtcagctgcggcacaagcagaggagtatgtaactgatctttgtttactgtgaagttctctctattgtctcaggaggtgggctgggcagtggagagccccctaccctaagctttcctgttcttggagggtagctggagcccctagcttgcctaagaaggccccagtagtgagtgcaggcaccagccctgatgacagtgggtgggtggctcccggtgaaatgcgctgaggtgtctttggggtgaggaggttagggggctgtactggctccccatcctacataggcaggaacatgatctgtttgcctatcacacccctgttctgggcggggttggtgactcctagttcagacacacatagccaatctctggacccctacgtggttgagagccacaggaaactgttttgtgagtctccgtgggagtggtttgggggcaaaactttgtaactcagcccaatagagatagctttgtggctcctctgttttctgatgtggtagcactgctgcttcatgtgaagggtggggcggggagagctccaccccaaacccttacatggttggttatggtggtgtccgctgattgggtccacctgacctcggccccggtggaagttatcgggtggcagcagagttggaatgggataggtagttccccgtttccaggaccccagacggcctgctgggacagtgtatatgagtccggaatgggctggaccagggtcaggctagcccagacttcaggtacgggctgtgatgacgaggagtgggctagtctcccgggtcggtcaccgctgaactctcaggtgagggcaggcagagcacttgggcggtggaatcccaaggaagatcaaaagcttggggggttgggttttcagaagggctctgggctgcagctgaaaatgtttacatggggcagggtggctgtgctgtgggtctttcaccggggagggcaggacccctcagctggggcagtggggacggggcactcttgcacttccctcccacgcaagcaatgctggatttcactgctgcgggcacacaaaggtgcaaagcctcctcttcccacgctggcctgggggtggtagggatggagccaaaaagcttgttgctggcctcagggaattgggctctcaaaggaaccgagccatggccataatttcaggaaggggcaggaaggccgttgtgggccggaagccagcgagcccgatttggcaggggacagcagacgcggggagtcctcggttacacagtctcctccttcttatctcagctgagacatcagtgctgaaggcacaggaaggtgtccagcctccttgttccctcccagacccgggggcaacaggggtggagggggaggcaaaggcaacagagatcgaaaagggcctgtcagctacctcaatgagtcctgcacgcagaggaacaccaagtctccaccgcggtgttcgggcaggaatggggcgggtgcactgggtgccagaaggtggtgagcctcatagtgtatgcagagagttgcccggtgtgtgcagtctgtccattgttcctccgtatcttggctgtgacatccatgctggaggtacacacaaatgtgtccagtcttcttgttccctccttggcctgagggcagcaaaagcggaggcagcggcagtggcgactgtggagggcttgtcagttacctctggggaacttgatccccattacaagccattacgagccacagtgttcaggcggggtcagggcagctgtgctaggagcccaggcctgggaccctgtctggtgaggagcagtggggatggagatgttgtgcagtgtgcagtttggcctctcctcagcaccacagctgcaccacaacctagggttgtgcagaagaggctggtcccacttgttggcagggctgcatggggatcaaaggcccaggggttccacgtgggcttgagtgtgcctctgcatagaccctctgtaggtctggaggcctacacagtggggtgggggttggtcaagggactctcccataccctgaattgcaaagacctaagtgtagattccccagggactctttctctgccttagggagcttctccctgctccagctctgcctctctctctgttctctgtgggtcccatcacttccttgaagaaaatcctagcatgatctcagcctattcacttgtagagttagtatttactcactactttgtgttcctctctgagagagaggcaggcactagctgcttctactcagtcatcttgaaccggaacctgatactcttcttttttttcttttgaggcagggtcttgctctgtaacccaggctggagtgcagtggtgtgacctcagctcactgcagcctcaacttcccaggctcaaatgatcttcccaccccagcctcctgagtagctgagactacaggcacacatcaccatccccagctaatttttgtatttgttgtagagacaaggtctccctacgttgcccaggctgggctcatgtttcccaggctgggctgcaactcctgggctcaagcgattcacccacctcagcctcccaagttgctgggattacagggaggggccgatactctttttctgataaatgactcagtctttttgtgtggctgccaatggaatctgtttttacattccgacaagtatattttgggttatgtcccagtgttgactactcagtgttaagcttctcagacacacggtaggcctctatgatatatagattcaggtgctcttttagtttgaacacattttattccattatcattctaaatatttgctccattctactgctttattttactctttgacaggttccaattatatatacactgaaaatccattgactatcttctcgttaatctgtttttttcatttcttaaaaaatagtcttttattttttagagcaatcttagattcccagcaaaattgaggggaagtacagagttccagtacacaccccacccagcacatgcagactctacccccaaccctctgcttcttaatcaacatctttaccagagtggtacatttgttacaattgatgaacctacatcgacatatcattatcacccaaagcccatactttacattaggtttctctctcagtgttgtaccttctatggatttggacagattattttttaaatttcatttcaatagcttgttggggaactattgtggtttttgtttacatagataagttctttagtggtcatttctgagttattggtgcagctgtcatccgggcagtgttcactgtacccaatgtggagccttttatccctcaccacccctattcttccccctaagtccccaaattccattgtaacattcttgtgcctttgtgtcctaatagcttagttcccacttataagtgagaacgtatgatatttggtttttcattcttgaattattgcacttagaataatggtctccaactccatccaggttgctgcaaaggccattattttgttcctttttctggctgagtcatattccatggtatgtgtattttatttatatatatatatatatatatacacacacacacacatacacacacatatatatatgtgtatatatatgccaacatctactttttttacttttaaattatggccattcttgcaggaataagaatggtaaggtggtatcacattgtggttttgatttgcatttccctggtcattagtgatgttgagcatttttttcatatgtttgttggccattgtatatcttcttttgagaattgcctatttatgccctttgcccactttttgatgggatatatatatatatatatatacacacacacacacatacacacacatatatacatatatatgcatatatatgtgtatatatacttatatatacatgtatatatatacatataaagaaaatgtggtatatatatatatatatatataccacattttctttattcacttgttggttgatgggcatttaggctggttccatatttttgcaacttcaggttctcctgctagaaacatgtgtgtgcaagtgtctttttcatataatgatttattttcctctggacagatattaggtagtgggattgctggatcaaatggtagatctacttttagttttttagggaatctccatactgttttccatagtggttgtactagtttatattcccactggaaatgtaaaagtgttcccttttcaccacatccatgccaacatctatttttttttatttttaaattatggccattcttgcaggaataagaatggtaaggtggtatcacagtgtggttttgatttgtatctccctgatcattagtgatgttgagcattttttcatgtttgttgtccattatatatcttcttttgagaattgtttgtttatgttctttgcccactttttgattggattatttttttttttgctaatttttttgagttccttgtagattctgcatattagtcctttgttggatgcatagtttgcaaatgttttctccaactctgggttgtctgtttactctgattattatttcttttgctgtgcagaagccttttactttaagtcccaactattttttattttgttgcatttgcttttgggttcttggtcataaattatttgcctaagccaatgtatagaagagtttttctgatattatcttctagaatttttatggtttcaggtcctagatttaggtctttgatccatctttagttgatttttatataaggtgagagatgaggatccagtttccttcttctacatgtggcttgccaattatcgcggcaccatctcttgaatagggtgtcctttccctacttcgtgttttgtttgctttgtcaaagctgggttggctgtaagtatctgggttctctattctgttccattggtctatgttcctatttttataccagtatagtttgaagtcgggtaatgtgttgcctccagatttgttcttcttgcttagtcttgctttggctatgcgtgctcttttttgatttcatatgaattttaggattgttttttctagttctgtgaaggacaatgatggtattttgatgagaattgcattgaatctgtagattgctttaggcaacataatcattttcataatattgaatgatacccatccatgagcatggaatgtgtttccgtttgtttgcatcatcgatgattactttcagcagtgttttatagttttccttgtagagatctttcacctctttggttaggtatattcctaagtacttaactttttttttttttttgcaactgttttaaagggggttgagttcttgatttgattctcagcttggtgtgcagcagtgctacagatttacatacattgactttgtatcctgaaactttactgaattcatttataagatctaggagcttctaaatgagtctttagggttttctaggtatacaatcatatcatcagtaaacagtgacagtttgatttcctctttacagatttggatgccctttatttctttctcttgtttttctgtttccccttatttgtcctcttgtcatagattttgagtactatgttgaatagaaatggagacaataggcatcattgttttgttccagttctcaggaggaatgctttcaacttcatccaagccttccataaaatccttgtataagcactggtaataggatagggaagtttcagtcctgctaactcctgttcctactcctactctacctcatattgggttggcagtctttacaagcacgtcagcctttgaattggtgccctggaagttttctctctaatccaatggcacgatctccaaagttatcagaaacttgcatttaagagttcttttcatgaacccctccaaagaagtaattcttgaactgtagctgattataactcacttttttttttgagaaggatcaaagccaaacatcaattgtggatgacaaaagtcttaagacagacataaagacacagttgaccaggaaattaggttatttattattttaacataataatcatacattactgacaacatatattaagacacattagaattttaggaatttcatataatcctggaacacatattaacgacacatttatataaatataacccaaaggaagcttaacaccacctcagatttgacaatgcttccggtataattcttttttttttttttttttttttgagacagagtttcactcttgttgcccaggctggagtgcaatggcacgttctcagctcactgcaacctctgcctcctgagttcaaacaatcctcctgtctcagcctcctgagtagctgggattacaggcatgtgccaccacactggctaatcttgtatttttactagagatggggtttctccatatttgtcaggctggtctcgaactcccaacctcaggtgatctgcccgccttggcctcccaaagtgctcggattactggtgtgagccactgtgcccagccacttcctgtataattctaacattacaaataagcctaataagcccagcatgtctctcttgaagttcagggaatccatttcccaataagttccttatttccatttgagaactcctcagcctggagttcattgtccatatcactatctgcatttcagtcaaaaccatttaaccaatatctaagagcctccaaattttccctcatcttcttgtcttcttctgaaccctcaaagctcttccaatacctgcctgttacccagttccaaacctgcttccacacaaaaactcactatcacaaggacagtaccaacagggatggtgctgtcattcatgagaaatctgctcccatgatccaatcaccagcaaccaggccctacctccaacattggggattacatttcatgagatttgggtagggacatatgtccaaactatattaaccacatatatctgtttctccaggattggtccctggtgacttatttagttgtttggtgtggtcatgttttcctggatgatcttgatgcttgtggatgttcatcagtgtctgggaattgaagagaggtatttattgtagtcttcatagtttgggcttatttgttcccattcttgttaagcatttccaggtattcaaagggacttgggccccaagcccaacaatgctgtggcttttgtagacttgtagaggtaccaccttggtggtcttggataaggtctggaaaaagtctgtagattaccaagcagagactcttgtccttttcccttactttctcttaaataaatggagtctttctgtctgtggtgagccacctggaactgggggtgtggtgatacaagcacccctgaggccaccaccactgagactgtgctggatcatacctgcagccagcatagcactgggtcttgcccaatgcccacaataactacaatctggctaccatctatgatcactcaaggctctaagactatacaatcagcgggtggcaatggcagccaggtttgtatcctttccttcagggcagcaagtttccccaggcaggtccagagatgctgtctgtgagtcaggaattggaggcaaaaaccaataaataataaacatcagagaagaaataaataaaattgagactttaaaaaaaaagaaataaaaaagataacaaaaggaacagttggtttatttatttatttatttatttattcatttatttttgagatggagtctcgctctgtcacccaggctggagtgcagtggcgcgatctcggctcactgcaagctctacctcctgggttcacaccattctcctgcctcagcctcctgagaagctgggactacaggcacccgccaccacgccttgctaattttttgtatttttagtagagatggcgttttactgtgttagccaggatggtctcgatctcctgaccttgtgatccacccacctcggccttccaaagtgctgggattagaggcgtgagccaccgtgccaggcctgttttttttttttttttttgaaaagatacataaagccaggcacagtggctcatgcccagcactttgggaggccaagatgggaggattgcttgagcccaggaattcaacatatgcaaatcaataaacatgatacatcatgtcaacaggatcaaagacaaaaaccatgtgatcatttcaagagatgctgaaaaggcattcaataaaattcaacattccttcatgataaaaactctcaacaaattgggatagaagaaacatacctagacataataaaggctatatgtgacaaacctacagttaatatgataatattacatttccagcaggagtgtaaaagtatttccttttcaccacatgcatgccaacatctgttaattttttatttttaattatggccattcttgcaggtgtaaggtcatcttgttgtggtcttaatttgcatttccctgtccattagtgatgttgagcatattttcatatgtttgttggccattcgtatatcctcttttgagaattgtctattcatatcctttgtccactttttgatgggattctttgtttttttcttgctgatttgtttgagttccttgtagattcaggatattagtcttgtcagatgcatagtttgaaaatattttctcccactctgtgggttgtctgtttactctgctgattatttcttttgctgtgcaggaggttttagtttaattaggtctgatctatttatttttgtttttgttgcatttgcttttgtgttcttggttataaactctttgcctaagccaatgtccagaagtgtttttctggtgttatcatctagaattttaatggtttcaggtcttagatttaagtctttaattcatttccttttccctagagacaatcaagctttcgatgatcatgtgatgaggtttccagtcagttccaggtgaagacaccactggccatcaagaagctaccctctccccaccagacagagcaggatgagagttctataatcctcaataggtagggacggtgctccaagtcagcatgaagcagttacagaagaaagaccctcagtccccctgcctcccataaagatttatggggatcacatctctcagaggggaaatgcacaggagaactgggcctggaggcagagaacctaaccccacctctccacacccaagtagtaaagggatcagaggctactttctttgtaactctccccatcttttctgcattgcagatgaaaaatgaaagtacctctgattggccaagtcttcatgtataactttgtaactttacttcagactctgattggtcaccttccacaaccattcagactggttatgggccattatttcatttacatagggtgtaaagcaaataaccaatgggaaacctcttgagggtatttaaactccagaaaattctgtaacccctgctcttgagccacttgcttcagcccactcccattctgtggagtgtagtttcatttaaataaatctgtgcttttctttcattgctttgtgcattttgtccaattatttgttcaaaacaccaagaacctggacaccctccactggtaacatcatcagtaataattatgattattattttaaattgcatgccacagaaataaccaaatttccttgtcaactgtgtctttgactacggctatcctaagacttttttcatccacaaatgttgtcttgctgtgatccttccaaaaaacgttactaataatcagctacagtccaagtcttgtttctttggaggagttcattaaaaggactcttgaatgcaggtttctgataactttgcagattgtaccattagatcagagagaaaactttcactgcacttattgaaaggctgatatgttcataaagattgctaatgcaatatgaagcagagtgagagttgattgcattgacagaactaatggaggactgaaataatttttatggctttttttgtttgaaatattgctgattctttttgttttgttttttggagtctgaagaattgttttcttttgagctatttataaacttgaaacatattttaagtgtattaagtaaatatacgtttgtaaacagaatttgagtcatatttttctctctgcctaatttctccagaatttgtaaactatttgtaaatattcttaattcacagcaatgtatttgattgcatatggttcataacaacatgtttttgatgcaggatattttcttgatgcctttgtgggacttgtgactggagtgccttgtatactcagtccactgtgctcaaccccttgcaggaggaagcactcaattgaacaagtgcaggaaccagctggctgcctcagcactgacagaagcaaattccatttgcttggacccactgcattccatcccttgtggaagagagcatgtaagcaagtgagtgcaggaactggctggctgctttggtgctggcaggagcaaacaccatgaaggccccatggcagagtccaggtaggggtgcctgcaaccccaaggccccagagggaatgttacagtgctctcttagctccacctttcacagatagcactgtgttatcagctcagtgggccctttgactcatcaatggggctgctgccctctgccagtgagagcaaagggccagtgtgacagcccttttgggtacctgcacttggtgggtccccaatttttgtccagtgccaaagaagaatgaggttggccaggcgtggtggctcatgcctgtaatcccagaactttgggagggcaaggtgggtggatcacaaggtgaggagttcaagagcagcctggccaacatggtgaaaccccgtctctactaaaaaaaaaaaatacaaaaaatagccgggcatggtggcacacacctgtaatcccagctgctcaggaggctgaggcagaagagttgcttgaacccaggaggtgggggttgaagtgagccgagatcgcgccactgtactccagcctggtgacagagcaagactccatctgagtaaaaaaaaaaaagcaagaatgaggtcaggtcacacagatgaaggatggtgaaggtggagtttactgagtgatgaaagtggctctcagtagagagaagagctggcaaggtggcaaagggatgggaagggcaggtttctctctcctgaagtcaagtcaccactctgcctctctcctccaaagtcaagttgcctctctgtgacatccagccatcatctatgtagtcaattcatctttccccaatgtccagccacttcttctccctcctggttgagggagggaggttgaggtctttataggcacaggatgggtatgggcaggccataggtagttttggaaaaggcgacattccattggtaaagatattattcagaaagaaccaatcaggagagagtaggcaaacaggaatagaagttctcactttgggcagtgggtttaaggatatttctggcttgaaggtgggatttccactggggaccctcccctgtctgcttagagtttctctgcttccaaagattgtgtttcagaagaaaagtctatattagattaacgtctgattcttgggcagccacgtggtcacccatggtatggagctgcctatgacacccctcctcagcatgaagcagccagaaagattgatgaccagattcctcatgtctgaggaattgataaatagaaagtgggggctgaaactgacccaatagtctcatagactgatctttttgataaacatagaaattgacccttctggtcttaaagcttgaaacttatatttgttttatctgcattccttcctcaggacaggaccttcaggcctctgaaaaaaaaaggatcaaagaactgaaactcaccagatcacctcaccagatgctggacccctcattcaccatgtttgcttccttgcctctccctagttcttattttcttacacattgttacatttcttccctgctatatcaacccctagttctagtcagtcatggagatggatttgagactgatctcccatcccctcagctacaccacctgattaaagccttcttccttggcaataatcattgtctcagtcattggctttctgtgcagggagcagcaggacctagactaaacccctggtgttttggtaacaaaataaggccaggcacagaaagacaaacatcacatgttcacacttatttgtgggatctaaataccagaacaattgaactcatagagatagagagtagaaggattattaccagaggctgggaagtgtggttgaaggagttggtgggcagtggggatgtagaatgtgtccaaaaaaaggaatagaatgaagaagtcctagtatttgatagcacaacagggtgactatagtcaataatcatttaactgtacattttaaaataacttaaaaggtgtaattgggttgtttgtaacacaaatgataaatgcttgaaggaattgctactccattttccatgatgtgattattgtgcattgcatgcctgtatcaaaatgcctcatgtacctcataaatatatatacctactatgtacccacaaaaattttttaagaaaatataccactgcttttccatttgtcaagtgaaaaacttctgggttatttccaggttttgactattatgaatagagctattaagaataataaaataccatggccagcatactgaatggggaaaagttgaaagcattcctcctgagaactggaacaaggcaatgatgccctttcactgttttttttttttgtttgtttgtttgtttgcagctattgtacaaggggttgatttcttgatttgattctccccttggtcgctgctgatgtatagaagagctattaatttgtgtacattaatgttgtatctgaaaactttgctgaattatcagttctaggagctttctggaggagtctttagggtttcccaggtaaatgatcatatcatcagcaaacagggacatttgagtccctctttattgattcggatgtcctttatttatttctcttgtctgattgctctggctaggacttccagtactatgttgaggagtggtgagagtgggcatctttgttttgtttcagttctcagagggaatgctttcaacttttccccactcggtattatgttggctgtgactttgtcatagatggcttttaatatattgaggtatatctcttatatgccaattttgctgagagttttaatagtaaagtgatgctggattttgtcaaatgctttttctgcatctattgagatgatcacatggtttttgtttttaattttgtttatgtgatgtatcacttttttttttttagacagagttttgctcttgttgcccaggctggagtgcaatggcccaatcttggctcaccgcaacctctgcctcctgggttcaagcgattctcctgcctcagcctcccgagtagctgggattacaggcatgtaccaccatgcctggctaattttgtaatttttttctagtagagatgaggtttctccatgttggtcaggctggtctcgaactctcaacctcaggtgatccacccacctcggcctcccaaagtgctgggattacaggggtgagccatcgcacccagctgtgtcacatttattgacttgcatatattaaaccatccctgcatccctggtatgaaacccacttggtcatggtggattatctttctgatatgttcttgaatttggttagctagaattttgttaaggattttagcatctaatgttctttatggatattggtctgtagttttctttttgattatgtcctttcctggttttggtattagggagatactaggttcatagaatgacttaggaagggttctctctttctctgtcttgtggaatagtgtcaaaaagattgttaccaattcttctttgaatgtctggtagaattctgctgtgaatccgtctggtcctggacccttttttttgttggtaatttttaaattaccatttcaatcttactgcttgttattggtctgttcaggacatctaatttttcctgatttaagctaggagggttgtgtctttccaggaatttatccatctcttctaggttttctagtttacgcatgcaaaggtgttcatagtagccttgaatgatctttcacatttctgtggtgtcagttgtaatctcttccgtttcgtttcttactgagcttatttggattttctctcttcttggttaatcttgctaatggtatatcaattttatttatcttttcaaagaactagctttttgttttatttatcttttgtatttttttgttttaatttcatttagttctgctctgatcttggttatttccttcctttcttctgggtttgggtttgatttgttcttgtttctcttgttccttgaggtgtgaccttagattgcctgtgctctttcagattttttgatgtaggcatttaggacgatgaaatttcctcttagcatcacctttgctgtgtctcagaggttttgataggttgtgtcactattgtcattcagttcgaagactttttaaattttcatcttgatttcatttttgacccaatgttcattcaagagcaggttatttaatttccatggttttgaaggttccttttgaagtttatttccagttttattccactgtggcctgagagagtgcttgatataatttcaattttcttaaatttattgaggctcattttgtggctatcatatggtctatcttggagaaagttccatgtgctgttgaatagaatgtgtattctgcagttgttgcatggaatgttctgtatatatatgttgagtccatttgttccagggtgtagtttaaatccattgtttctttgttggctttctgtcttaatgacctgtctagtgctgtcagcggagtattgaagttcctcagtgttactttgttgctgtctatctcatttcttagatctattagtaattgtttcataaatttgggacctccagtgttaggtgaatgtatgtctagtattgtgatagtttcctgttggacaaagccttttatcattatataatgtccctctttgtgcttttttttattattatactttaagttctgggatacaagtgcagaatgtgaaggtttgttacataggtatacacgtgccatggtggtttgctgcacccatcaacccatcatctacactaggtatttctcctaatacatccctcccctagctccccaccccctaacaggccccgttgtgtgatgttcccctctctgtgtccatgtgttctcattgttcaactcccacttatgagtgagaacatgtaatgtttggttttctgttcctgttagtttgctgagaatgatggtttccagcttcatccatatccctgcaaaggacatgaactcatcctttttatggctgcacagtattccatggtgtacatgtgccacattttctttatccaggctatcattgatggcatttgggttggttctaggtctttgctattgtgaacagtgctgcaataaacatacgtgtgcatgtgtctttatggtagaataatttataatgttttgggtatatacctagtaatgggattgctgggtcaaatggtatttctggttctagatccttgaggaattgccacaccgtcttccacaatggttgaactaatttatgctcccaccaacggtgtgaaagcgttcctatttctccacatcctctccagcatctgttgtttcctgactttttaatgatcgccattctaactggcatgaggtggtatcacattgcggttttgatttgcatttctctaatgacccagtgatgatgacctttttttcatatgtttgtcagctgcataaatgtcttcttttgaggagtgcctgtttacattctttgcccactttttgatgtggtcgtttgtttttttcttgcaaatttgtttaagttttttgtagattctggatattagccctttgtcagatggatagattgcaaaaattttctcccattctgtaggttgcctgttcactatgatgatagtttcttttgctgtgcagaagctctttagtttaattagatctcatttgtcaattttcgcttttgttgccattgcttttggtgatttagtcatgaagtctttgcccatgcctgtgtcctgaatgatattgcctaggacttcttccagggtttttatggttttaggtattgggtttaagtctttaatccatcttgagttactttttgtataaggtgtaaggaaggggtccagtttcagttttctgcttatggctagccagttttctcaacaccatttattaaagagggaatcctttccccattgcttgtttttgtcagatttgtcaaagatcagatggttgtagatgtgtgacattatttctgaggcctctgttctgttccattggtctatatatctgttttggtagcagtaccatgctgttttgcttactgtagcaattgtagtatagtttgaagttgggcagcttgatgcctccagttttgttctttttgcttaagattgtcttggctatacgggctcttttttggttccatatgaaatttaaagtagttttttctaattctgtgaagaaagtcaacagtagcttgatggggatagcattgaaactataaattactttgggcaggatggccgttttcatgatattgattcttcctatccatgagcatggaatgtttttccattcatttgtgtcctctcttatttccttgagcagtggtttgtagttctccttgaagaggtccttcacatcccttgtaagttatatccctaggtattttattctctttgtagcagttgtgattggaagttcactcatgattttgctctctgtttgcctgttgtcagtgtgtagaaatgcttgtgatttctgcatattgattttgtgtcctgagactttgctgaatttgcttttcagcttagggatattttgggctgagacaatgggttttttgaaatatacaattatgtcatctgcaaacagaaacagtttgactccctctcttcctatttgaatacgctttatttcttttgcatgattgccctggccggaacttccaacactatgttgaataggggtggtgagagagcatccttgtcttgtgctggttttcaaagggaatgcttccagcttttgcccattcagtatgacattggctgtgggtttgtcataaataactcttattattttgagatatgttccatcaatacctagtttattgagagtttttagcatgaaggggtgttgggttttaacgaaggctttttctgcatctcttgagataatcatgtggtttttgtcattgattctgtttatgtgatggattacgattattgatttgtgtatgttgaaccagccttgcatcccaggtataaagctgacttgatcgtggtggttaagctttttgatgtgctgctggatttggtttgccagtatcttattgaggattttagcctcaatgttcatcagggatattggcctgacattttctttttttgttgtgtctctgccgggttttggtatcaggatgatgctggcctcataaaatgagttaaggaggattccttctttctgttttgtttgtaatagtttcagaagtaatggcaccagctcctctttgtacctctggtggaattcggctgtaaatccgtctggtcctgggcttttttttttttattggtagactattaattactgcctcaatttcagtacttgttattggtctattcagggatttgacttcttcttggtttaatcttgggagggtgtatgtgtccaggaatttatccatttcttctagatttttgagtttatttgcatagaggtgtttatagtattctcagatggtaatttgtatttctgtgggatcagtggtgatatcccctttatcattttttattgtgttttgattcttctctcttttcttctttattagtctggctagccatctatctattttgttaattttttcaaaaaaccagcacctggaataattgactttttgaagggtttttttatgtctctatctccctcagttttactctgctcttagttatttcttgtcttctgctagcttttgaatttgtttgctctcacttctctaaatttctactctgatcttagttcttttaattgtgatgttagggtgtctatttcatatctttcccgcttcctcctgtgagcatttagtgctataaatttccctctaaacactgttttagctgtgtcccagagattctggtacattgtgtctttgttctcattggtttcaaaggacttcttgatctctgccttaattttgttatttacccagtagtcattcaggagcaggttgttcactgtccttgtagttatgcggttttgaatgagtttcttaatcctgagttctagtttgattgcactgtgttgtgagagactaattgttatgattttcattcttttgcatttgctgaggagtgttttacttccaaatatgtggtcagttttggaataagtgtgatgtggtgttgagaagaatgtatattctgctggtttggggtggagatttctgtagatgtctattaggttctcttggttcagaggtgagttcaagtcctgaatattctcgtaattttctgtctcattgatctgtctaacagtgacagtggggtgttaaagtttcccactattattctgtgggagtctaagtttctttgtaggtttctaagaacttgctttatgaatctgggtgctcctgtattgggtgcatatatatttaggagagttagctcttcttgttgcattgatccctttaccattatgtaatgcccctctttgtcctttttgatttttgttggtttaaagtctgttttatcagagactaggattgcaacccctgctctttttttttttttttttttgctttccattttcttggtaaatattcctccatccctttattttgaacctatgtgtgtctttgcacgagagatgggtctcttgaatatagcacaccaatgggtcttgactctatccaatttgccagcctgtgtcttttaattggggtatttagcccatatacatttaaggttaatattgttagctgtgaatttgatcctgtcattatgatgctagctggttattttgcccattagttgatgcagtttcttcagagtgtcgatggactttataatttgatatgtttttgcagtaactggtactggttgttcctttccatatttagtgcttccttcaggagctcttgtaaggcaggcctggtggtgataaaatctctcagcatttgcttgtctgtaaaggattttatttctcctttgcttatgaaacttagtttggctgaatatgaaattctgggttgaaaattctttgctttaagaatgttgaatattggcgcccactctcttctgacttgtaggatttctgcagagagattcactgttagtctgatgggcttccctttgtgggtaacccgacctttctctctggctgcccttaacatttttttcttcatttccaccttgggggatctgataattatgtgtcttagggttgctcttctcaaggagcatctttgtggtgtactatttcctgaatttgaatgttggcctgtcttgttaggttggggaagtcctcctggataataacctgaagtgtgttttccaacttggttccattctccctgtcagtttcaggtacaccaatcaaatgtaggtttggccttttcacatcgtcccatatttcttggaggctttgttcattcctttttattcttttttctctaatcttgtcttcatgctttatttcattaagttgatcttcaatctctcgtatcctttcttctgcttgatcagtttggctatcaatatttgtgtatgtttcacaaagttctcatgctgtgtttttcagctacatcaggtcatttatgttcttctctacactggttattctagttagcaattcctctagcatttttttcaaggttcttagcttccttgaattgggttggaacatgctcctttagctcggaggagtttgttattacccaccttctgaagcctgcttgtgtctatttgtcaaactcattctccgttcagttttgtttccttgctggcgagtacttgtgatcctttgaaggagaagaggaattccggttttgggaattttcagcctttttgcgctgatttttcctcatctttgtggatatatctagctttggccttccagtggggtttctgtgtggacgtcctttttgttgatgttgatgcttttcctttctgtttgttagttttccttctaacagtcaggcccctctgctgcaggtctgctggagtttgctggaggtccactctagaccctgtttccctgggtatcaccagcggaggctgcagaacagcaaagattgctgcccgttccttcctctggaagctttgtcccagaggggcacctgccagattccagctggagctctcctgtatgaagtatctgacaacccctgctgggaggtgtctcccagttaggaggcatggtggggagggtggtcagggacccacttgaggaggcagtctgtcccttggaagaacttgagtgctttgctgggagatctgctgctcttttcagagctggcaggcaggaacgtttaagtctgttgaagctgcccacagctgccccttcacccaggtgctctgtccaagggagatgggagttttatctataagcccctgactggagctgctgcctttctttcagagatgtcctgcccagagaggaggaatctagagaggcagtctggctacagtggctttgctgagctgcagttgactctgcccagttcgagcttccaggcagctttgtttacgctgtgaggggaacaccacctaccaagcctcagtaatggtggatgcccctccccccaccaagctgtagcatcccaggtggacttcagactgctgtgctagcagcaagaattttaaggcagtggatcttagcttgctgggctctgtgggggtgggatccgctgagctagaccacttggctccctggcttcagccccatttccaggggagcgtatggttctctctagctggcatttcaggcaccactggggtacgaaaaaaattcctgcagctagctcaatgtctgcccaaacggccgcccagttttgtgcttgaaatccagggccctggtggcataggcccccaagggaatcttttgatctgcgggttgtgaagaccttgggaaaagtgtagtatcagggccagagtgcaccattcctcacgacacaatccctcacggcttccttggctaggggagggagttcctcaaccccttgtacttccccggtgaggcaacaccccaccctgcttctgcttgccctccatgggctgcacacattgtctaaccagtcccagtgagatgagccaggtacatcctttggaaatgcagaaaacacccgccttctgcattgaactccctgggagctgcagaccagagctgttcctgttcggccatcttgccagccacccccatgtttgtcttttttaactgctgttgctttaaagtttgttttgtctgatataagaatagctattcctgctcacttttggtgtccgttcatgtgaaatgtctttttccatctttttaccttaagtttttgtgagtccttatgtgctaggtgagtctcccaaaggcagcagatggttggttggtgagttcttatctatccttcagttctgtatcttttaaggggagcatttaggctatttacattcaatgttagcatggagatgtgaggtatcattccattcatcgtgctatttgttgcctgtatacctttgttttttgttttttgctttttaaattgattgttttataggtcctgtgagatttatactttaaagaggttctcttttgatgtgtttctaggatttgtttcaagatttaaagctctttttttgcagttcttgtggtggtggcttggtagtggtgaattctctcagcattggtctgaaaaagactgtctttccttcattgatgaagcttagtttcactggatacaaaattcttgggtaataattgttttgttcaaggaagttgaagatagggccccaatcccttctagcttgtagagtttctgctgagaaatttgctgttaatctgataggttttcctttatagttacctggtgcttttgcctcacagttcttaagtttctttccttagtcttaactttagataacaataacctgatgacagtgtccctaggcaatgatctttctgtgatgaatttcccaggtgttctttgtgcttcttgtatttggatgtctaggtctctagcatggtcaggaagtttttcttgattattcccccaaatatgttttctaaactttcagatttctctttttcctcaggaacaccaatttttcttaggtttggtcacttaacataatcctagacttcttggaggctttgttcatattttctttttttgtctttgttggattgggttaattcaaagaccttgtattcaagctctgaatttctttcttccgcttgttcaattctattgttgagagtttccaaagcattttgcatttctagaagtgtttcaggaacattgtttcctgaagtttttattgttttttatttacgttatttccttaaatatttctcccttcgcttcttgtattattttctggatttccttgcattgggctttgcctttttctgatgcctccctgattagcttaataactaacctcctgaattctttttcagatacatcaggtattacttcttggtttgggtccattgctggtgagccagtgtgattttttcaaggtgttaaagaaactcattcttaaatgagaataaaaaaggaatttattaatcgcaaaaagcaaattgtaactgcacagtggggaaacctggcagatgtcactttatccaaatgatcagagttaacatcatcaggaatggaactaatcactatcaagtgccttctaataccatgaactgagaaccataacatcccttctatggtattcatgccaaaaatgcataacctgcatctaatcatgagaacacatggaatgacccaaaatcatagatactctgcaaaataataggccaatcctcttcaatagtgtcaaagatatgacaaacactgattaacatttccagattaaataagacttaaaagaaatgaaagctcaatacaatgcacgatcttagatcaaatcctagaccagaattatttctcatttgccataagacatttgtggcacaactgataaaattcaataaagtctgtagattagataatagtatcaatgttaatttactgattttgatgatggtactataaatgtccttttaggaaatacccactgaagtatttagaggtaaatgggaacctgtctgctacttattttcgaatatctcaggaagaaaaatggtagaaggaggcacagggacaaggcgagagaaggccatcaggatcatctgtggtcaaaggactctgggcacactgacatccaatacctaattttaaacttttgattgttttattattattttgttagagatagggtcttactctattgcccaggctaggatgcagtgacatgattattgctcactacaaccttgaactcctggaatcaagcgatcctcttgcctcagccactggagtatctaggactgcaagagcacaccaccacacccagataatttttcgttgttgtcttctggagagggggtatctatgttgcccaggctggcctcatatgatcctcccacctcagcctcctcctgctaatattataatttaagtatttgccttttgctatgctcaaagttttacttagccttgttgaaagtagggccaagtgttgactgctaatgtgtgaaacaaaagatatgacttctttccatgcttgggatacagaggagcatagaggaacagaagcttagaaaagccattatgtcaagccaactagaaactatcagaggccttggtacagcattttattgcaagaagtggccggagactaccaggacagatctgtggaacatggaagcattcctggaattctcagaaatctcaatagaaagaagctaggtttaaaaaacaaaaacctttgtctatttacacataataagagctcagacaatattagtgggtactaaaaatctcagtgacactgatacctggagaatttagatacattccaatttcaaataaataaatttttctgctataaagtagaataaattaaacaaatatcttgaccctccctccattgccccttgtgtccaatctagaagtaagagaaagaggaaacataggtgctgtggggttgttggtcatatagattccccaaaaaacaaggagaacctcatcctggtgttcagaaccaaatcacatacattgtaaatgtgatcaatgccttgaacagggaaatagctaagaagtacattttggggaatgaggtatttacagccttatgcaaaagaaaataaaaggctgtaggagggtgggatgtgatagatgtggagatgcactccctagatccccttttaataaaggacttgctgcccagatatggagagggcactcagcaaacagcctgcaaatgtcagctcctttgaagtctgcctcagctgcagagccaccttgcctggggtcacaatcccttcccagaaagttcacaactggcccctgagcaaggctacattcctcctcatgtggggatccaggctgacagaaggtccctgtctgagacattgtcagtcttgaggcagaaagaaacaagtgtatggaggatctaaatggtggctctgaaagctcttgttcagggtagcacacatcatttctactcacatttatatttggccaaaacaaagcacatggcccagcttgattacaatggagtagcaagtgtaatcctaagagtgtaagaaaatgttttggaaaggaatacagtcagccaggcatggtggcctctgcctatagtcccagctactcagaagactgagtcaggaggattgcttgagcccaagagtttaagtccagcctgggcaacatgtctcttaagaaaaaaaaaacctatcaaaaatatttgctcacaaatattcacttttattccttttatatacctttccttccttagagaaataacaaaaattccattccaatgcaatgccccatcatagacaaaatccagatcatgtgatggtctttatatcaggcctgggtatgactcctttggagatatttgaattaaaaatacaagttatcacacatacacacacattatacaacagtgaaataaatagtaacagaataacatttaataatcctctcatttgataggccaggagtgatggcttatgcctataatctcagcactttgggaggccaaggcagatggatcccttgagtatgggaggttgagaccagcctgggcaacatggtgaaacctcatctctaaaaaaaaattacaaaaagtatcaggcatggttgtgtatgcctgtgatcgcagctactcaggaagctgaggtgggatggctattgcacaatggcaatccagcctgggcgacagagtgagaccctgtctcaaaaaaaaaaaaatcacctctcatttgggaaggggaagaatgggaggcacagaatagtccctggtccctagaaattttgaaatgctgttgggcagacactctgaggcactgttacccaggggtggggactattccctgtggttctgattctagtcagtggttgcccatggtgttttcctccatttcactctagccttactgaggtatgattgacaaataaaattgtatatattcacagtgtacaacatgatgttttgatacatttatacattgtggaatgattaaactcagctaattaatgtatctgtcacctcacataggtatgttttgtgataagaacaattgagttctactctcttgggaatttttaaatatacaatacattgttattccttgtagttgccatgctgtacaatagatctccagaacttattcattttgtctaactgaaactttttaccatttgaccaacatttccccatgttccgacctctgcccaccatccagcccctggcattctttctttgcttctatgaattcgacttttttagattccacatataagtggaatcatgtagtagttgtccttctgtggctggcttatttcacttagcataatgtcctccaggttcatccaccttgttgcagatgacagaattttcttcttttctaagtctgaatagtattcccgtgtgtgtgtgtgtgtgtgtgtgtgtgtgtgtcttactttctttaatcacacatgcatcaatggacagttttggttaattccatatcttggcaattattaataatactacaacaaacatgagattgtagatacttcattgatctactgatttcatatctttcagacatatacccagaaataggattgctgcatcatatgatagctatgtttatttttaattttttttagaaattagatttcactctgttgcccaggctagagtgcagtggtggcatcctagatcactgcagcctcaacctcgtgagcccaagtgatcctcccgcctcagcctacagagcagctgggaacacaggctcatgccaccatgcccaggtaatttttaaaaatgttttgtagagataaggtcttgttgtgttgcccaggctggtctcagattcctggcttcaagtggtctccctgccttagcttccgaaagtgctgggattacaggtgtgaatcacttagcctggcatatttttaattttttgaggaactgccatattgttttctctaatggctgcactaatttaagttcccaccaacagtgtgcagatactcccttttctccacatccttgccaacacttatcttttgtctttttagtaatagctgcatgagtatgagatgagatgatacctctttgtacttttaattaatatttccttcattattagtaatattgaacactttttcatatacctattggccattgaaatgtcttcttttgagaaatgtctactcagatactttgctcatttttaaattaaattatttgtttccttgctattgaattgtttgagttctttttatattttagatactaaccccttattagatgtatggtttgcaaatattttctctccttctgtaggttgtctccattcctttgataatttcctttgctgtgcaaaagctttttgttttatgtcattcatttgtctttttttgcttttgttgcctgtacttttggggtcatattccaaacattcattgccaagaccaacatcaataaatcaccctttgggttttctgccagtggttttatagtttcagcttttacatgtaagtccttaatcaatttcgggtttatttttatgtggtatgagataaggacccaatttcattcttctgcattggatatccagttttcccaacactatttattggaaagagtatcctttcaccatgtatgttcaaggtaactttctcaaggttgcttggcctatgaacgtatatatttatctctgggatctctattctgtttcattggtctatatgactctctttatgccagtacgatgctgttttgattactatagctttgtgctacattttgaaatcaggtagtgtaaagtctcctgctttgttcttcttactcaagattgcttaggctatttgggatcttttgtggttccatagaaattttaagactgtttttctatttctgtggaaaatgtccttggaattttgatagaaattgtagtgaacctgtagttcactttgggtagaataaacatttcaacaatattaattcttccaatccatgaacatgggatatcatttcatttattagtgtcgtcttcaatttctttcatcaatgttttataatttttaatgtgcagatctttcactccctttgttcaacttattgctaagtattttttttgtagctattgtaaatgggattgttttcttgatttcttttctttcctttttttttttgtgttttttttttttgttttgtttttttgagacagagtctcattttgttacccaagctggagtgcagtggcttgatcttgactcactgcaacttccacctcttgggttcaagtgattctcccacctcaacctcccgagtaggtgggattacaggtgtccaccaccatgcccagcaaatttttgtatttttagtacagacagcattttaccatgttggctaggctggtctcaaactcctgacctcaagtgatccaccctccacagcctcccaaagtgctgggattataggtgtgagccaccacgcctggctgatttctattttgcatagttgttatcggacagaaacactgctgatttttgcatttctagttttgtaccttgtaactttaccaaatgtgttaattagttctaacagttcctgtggagtttttagggttttcttgtagggagaccccctgaaactattgctacagaataaaagatgaaatgctcctgattattataaatacaaaattgcatgcaggattgtgtaaagacaatgcaaggttgggctgcctgaatgagccaacagcacatgatgtgcttcctcctgcagagagcctataaacggatgtgcagtcagggaggtttcacatcaccaatattcttatcccagaaaagcagatgttcacagctctgggaatggaatgcgacccttgtggagagcctataaatggacgcatgaggggcggccattcatatgtataaaatagggttttaaatgcccttatcttgccatggctcttctaggtctctttagggttaaggcatactcccttctgagaatttgtggtctcaccggttgtctagtttcacatcctgtttccatcaattgtttgcaaccagcttttgctgcaactgttactgctgattaatatcttgctaaacataggttatggatagactgtgtttctgttttaaggctctgttaaaaatcactgacacacacactgtattgtaaattcttatctctgtattctgcacttctgcatacagatgttatgttaaagaattacttcatccccatgtgaccatctcacctcataatcaaagaccctaaatccctcactaacctacccccaccctcactaaacttaataataaatgctgctatatccagtgcattcgtggcatcacaagaccagaaggcggtgacccccctggacccagctttcactatctcgcatgtgtcttttatttcttgacctgccgatccacctgggaacaaagaaagagccccgttggattgcaggctgctggtcagatcccacaatattttccgtatataatatcatgacatctgcaaacacagataattttattttgtcctttccaatttgggtgccttttatttctttttcttgcctaattgctctggctaagaattcagtatctcttgaatagaacccatggttcctgatttcactctcaagagggtgtcattatctttttccacttttttttttttttttttttgagatggagtctcactctgttgcccttcttccacttttaaagtggaaagtttcccttttctattattttcttcaaccacatttaaagcaggaactggggactgtaccttcctttagaactaaccagctttctcaacctactgcttgcccaaagaatgttggagtccaagggttgtgtttagtctgaaagcatcacagtttttgctttctggattttaaaaatctaggtatggctccttggcaatttaactttctcaaaaacttcttgttgtttttctaaatctatacggtcccagttaactctgtgtgctaatacaattcagtatttttgagatgtgcttctctctttagatttaattatattaccttgaattagcaggctttcatcagaaagcaatgcactcaagctcttttctctgagcaattttgtctgaaaggatttattggctgacatcttagttgattcagaggtttccaccataggtttaatagctacttattaactgcctctttgccaaagactgagtttgaatttctgtctttgttacccaaagacattctcagattttttattagttgaagaagagaaatatttgcaacttcttattctaaaagtccaaaaatgtgtagaccattttcttcccttcctgcttgcaaagagtttagtgcttttccaagcacatttttcctcccaccttttgtattaccctacctagtagcgatcaaactatattactagcatctgtttccttacttcttcactcaaatccacaggctcatttaatacattatcttcattctaagttattaaaggtgactgttttgtccagtctttcactgctacaaaacaggggttgacattttcccagcctccaataatattttcttcattgcccatcactcagccctggaaccaaagccacaatttaaattattttgttatgcagcatcccactctaagcaccaatttctgtacaaatcagaactagccagattttgctgtggtaacaaattatccccaaagtttccatgactgtttaaaaataacaaatgttaatttctttcttaaactatatgtctgttgtggatcccatttggctctactcttcattgttttcattccaggacccagacaaagcagccaaatctgggtcattgcctatcttataccagaagggaaaaagaacatggcagaaacactcaatgactcttaagagttcttcttggaagtaacacacgttatgcctgcttatacttcattgatcataacaagtcacattgccaagcctgagaccaatggggcacagaatatgatctacttctgggtagggatatcaaccttatcaaacaatatttcaatttatcacaccatcttttgctccaagatgactgtaccagattctggcatcttgtcaacatttcagccagcagaaaagaattcacactcttttcacgagcacaatatgaaaattatacacattaccttccaatattccattggccaggccttgggaacaagccatatctatctgctttggagcatgggaaatacagtttgtggttttttgttttggggtatttttttgtgtgtctatcttccccactacccccaaaaccatacagttcttacctgggcatccctatagtgggttttttgttttgttctgtttttctttttaatgtggtccaataattgtgtcttacttggaatttagtctcaacactattgaataaataacaaaaatccagtctccactataggctctgcacagctgccaatgctaacgtggaagatggcaaggagccctgtgccttgtcctctcactctgggagcacaggctgcaagttggaagggcaacaaaaatgttctctctccaggtgtgaaacacagtgggcatgtagagctgcgacacggagtgccatacaactgccatctgcagggttgaggtgatggatgcctttcttgggtgtcaagctgaaaacaagagaactgtgctgtcatctgaggagaatgtaatcactccttccacaactgttgcatgtccctgtgggtacaacagagcaatcactgacctctctgccagcaagactggatggtctaaagaataagagacggagagtagcagaaggctttcttagtgcacttgccctaacccttggtggatcttgttatcaagtgtccaacaaaggctggaacattccaggggattaattcttcaaataggacaccatgaatctgtcctttggaaactcatcaaggcagaatttacaatttcatcagttttattttcaggaattctctacaattaagaagataatttactaaaaacagtctttcctacctctgaggtgtgtgtcacacacactgattagaagtgctatagaaaagaaaattccaaatcgaatgaccttcaaaatttgcctgttaatacccaggtgtggaaacagttccattcattcagagaacttttgtatgcttgtggttgatcagttttaaaaaaagagaatagtaataaataaagtacagtttaaaacccagaatgggcagggtatggtggctcatgcctgtaatcccaacaggtgtgactaggatgagaggagtgacacagggcccggcaaatgcaaagttggatcctctcttcatttagcatttttatattttattcatcagaaatgtttgcattaattttgattttaaaatattgtttatcttggtcactgagaggtggtgtttctttggtgcccccttcaattttgcactagcaggtgcctcactctcctgcctcactctccttacccagccctccccataggctcattgtcttaagtgcggtgatgatttcaagggattctacataggccgatatccatcattttgtacactttaaacaagtgcaatttcatgtatatcgattatagctcaatacagttatttttatagtaatatataaagcaatagagcacaggctctgtgcactggtcgccttttccctgcagctgtggtctccgtcctagtttctcgcatctccagaatccaaagaccaagacaattccccagggtaatgctgtcggcgcaggacccgagactcctgctgcaggcatcttctttggctcctcctgaggtgggtgctgcgctcagaggcttaggcccgcacccacctccctaacccacgcccctccgcagccgcctgctgctcgcgcgctgcagagattgatgcccacccaccccttttccgggcaggcgaggattagacagggtccaaccccaggggacgctggccttcaagcccaccaacaactggtcagagtgaggatccccagatccgccgggatgaggggagaatctgaagttcgcagggtctgcgaaataggctggagaaagctcatttacagagaaaaaaaaaagacgcggaactgtcttcagggccctcagaagtggtttaaattctccgcaaggaaaccgaggcgggtactgaggtcggtctcgccctttccagggcgcgcagtgaggtcaccccgggaacggctgtcaccgcgggaggagagcagcccagggaactaaagacgagtccagttaccagggaaatgtcctgaacacgtgtggtcatccctgccggaatgaggttgagtgattccttaggtcaggcactgcggttaagtcctgcaatcccagcaaattcacaggcagaggcagaggcgggaggattttttttttttttaaattaaccaggcctggtggccctaatctgtagtgctaactactcaggaagctaaggcaggaggatccctttagctcaggagctggaggctgcagtgagccgtgattgcgccactgcactacagcctgggcgacagagctagttcctgtttcaaaaaagaaaaaattcctcaaatgttaattatgaaatatttcagaagtacgaaaaagtgtaccaccaccggcgctaccacttccaccttggcaagtgaagccccactacaatggaagcgtcgggcgtatcctcccgggcctctttccctccctccccggcccttccctcttccgatttccctcccgccctttcccctccctcccctcctgacctcgacttccttcccttctctgtctaaggggcagggcggaagatcgagcctcaacgctgccccacacccacgctggatttaaagcccacgctgtaggcgtctgtctccgcggtggcagcgttttcctgtcctctccaggactgggagagtgcagcgctcctcgttccctttcctggtgcaggaaagtgagaccgccttcagccttctctctgcgcctccccagaccctcatctctccagtgattcttatggccctgccctgggagggggtcacccattcagcaaaaagtcaccgagggcccaaaaggttttgccagagaaataggacggctgaaaatgttaccctgatggtacaaacggaataaccccgtaggcacacataattagctgttttctgagggtatcaaaagccactatgggtggagtgcctcacgcctgtaatcccagcactttgggaggccaaggtgagaggatcgcttgaggggagttcaagacgagcgtggacaattctgagggaccccgtagctacaaaaaaaaaaaaaattttagccaaatatggtgagcatgcctgtagtaccagctactgaggagcctgaggtgcgaagatcacatgatcccaggagtttgagaccagcttgggcaacaaagggagacctcctctctacaaaaaagagaaacaaaattagccaggcttggtggccagcgcctgtagtcctaactactcagaaggctgaggtgggaggatcccttgagcccagagtttccaggctgtagtgaccgcactccagcctgggcaacagagcaagaccctgtctcaaaaaaaaaagaaaaaaaaagaaaagccaatgcatactgctggtgaggcaggatagttaggcaaggaagtaaccatgttttctggaagcagcagccatggttataaaataactatcatatgatccagcaatcccatttctggttaattaaatttcaattgcaagcacccttttctgggtatatatctaaaagatgtgaaatcagtatgtcaaagaggtatctacgctcccatgttcattgtagtattgttaataattaccaagatgtggaattaaactatccattgatgcatgaacagatacagaaaatgtgttacatacacacatacacacactctcaaatacacaccacacaaaatgaaatactcttcaaccttagaaaagaagaaaatcctgtcatttgcaacaacatggatgaacttggaggacattaagctaagtgaaataagccaggcacagaaggacaaatactgcatgattccaattatatgtggaatctaaaatagttgaactcatggaagcagagggtagaagaatgccaggggccggctgggggacaaaggtcagggaatggggagatgttggtcaaaggatacaaggtttcagttaggatgaataagttctggagatcagttgtacagcatggtgactacagagaataataatgtattgtatacttaagggtattagaaaccaagatctggatccccattgctatttatttgtttgtttaatttgttgatgttgactgtggtggatttttttttttttttttttttttgagacagtgtcttgctttgtcacccaggctggagtgcagttgtgcaatctcggctcactgcaacctttgcctcccaggttcaagtctttctcatgcctcagcctcctgagtagctgggactacaggcttgtgccaccatgctcgactgaatttttttgtatttttagtagaggtggggtttcactatattggccaggttggtctcaaactcctagcctcaagtgacctgcccacctcagcctcccaaagtactgggattacaagcgtgagctaccacactctatctgttatgacttttgccagatatcctgtatatgcctaatactagaacaatctgagcatctaaataaataatgtagcgttggaatataacacaaagtattaaataaatatctataagtccattcttacaagtaaatgaagaattccaaataatttatatagataaattattttgtaggatatatagacattggccccctcaagaaagtggagcttcaatcctcaccctttgagtgtgagctgcacttagcaacataggaggaaggaaaagtaacttcactgtagagaaacctggcaaacacttcctctgtcagctggtcaaggttgatatcatgagtgataaggcatgttgatagcatatacccttgatgtgatgtgatgagaatacctcttcattcctgtggtcttcctcttgaaaacctataaccccagtctgagaaaaaaatcagacaaacccaaactgaaggacattttatttgtagatacctgaccagtactcctcagaactgtccaggtcatcaaaaataaagcatcacaggtcagaggagtgtaaggaaacatgaccactaaatgtagtatggtgtcctggatgggatcctggagtaggcaaagacattagagaaaaactagagaatccaggccgggtgcagtggttcatgcctgtaatcccagcactttgggaggccgaggagggcggatcacaaggtcaggagatcgagaccatcctggctaatacggtgaaacccggtctctactaaaaaaatacaaaaaattagccaggtgtggtgacgggcgcctgtagtcccagctactcgggaggctgaggcaggagaatggcgtgaaccccggaggcagagcttgcagtgagccgagatcatgccactgcactccagcctgggcgacagagcaagactccgtctcaaaaaaaaaaaaaaaaaaaaaaaaaaaactggagaatccaaataaaatgtggggtttagttaatagtcatgtactaagtaaggttggttccttagttgtgatgaatgcatcacaacaatacagtaataaaacagggaaatagccactgcaatggctcacacttgtaatcccagcactgtaggaagcccacgcaggaggaatgcttgagcctgggagtttgagaccagcctgggcaacataataagaccccgtcctctacaaaatttttttaaaaaaatagccaggtgtagtggcatgcacctgcagttccagcttctcagctagttggggtgagaggatcactggagtccaggagttaaaggctgcagtgagctgtgatcacccaactgtactccaacctgggtgagagagcaagaccttgtcaaaataaaataaaataaaataaaataaaataaaataaaataaaataaaataaaataaagaggaaactaaatgaaggggacacaggaactttctgtactatctttgtaactttttctgtaattctataactactctaaaataaaaagttaatttaaaatataaaaacattttgtttcattttataatggctgggtagattttcagatctttagtgaagtaggtcccagatgtctagaggcagattgcagagatgggcaggcacccatccaaacccaactgagtctagtgcactggctcatgcctataatcccagcaatttcggaggctgaggcaggaggatcacttgagcccaggagttcgaggctatagtgagctatgattgcactactgcattccaacctgggcaacatagtgagatcttgtctcttaaaaaaaaaattgaaagttaatgttgcttaatcttttactggctcgttttggccctctcacagagtcactggcctcagtcttctccttttcccccatttaagcacttattttacaagaccatttttttcagtttaatgagacacaaactctcaactttttatttaaaacagaaatgcagtagtaagctaaaccttttgccattcatagggaaacaaatatcagtaatcctctttgttctaaacaaaaattcataattatttatacattttaaaatattatattgtttcaaatattgttagtggggcaataaatcataaagagatacaaccagtcgaaattagacttttaaagaattactctcaaagacattgcaacaactccaaagtccagggatcttataagactaatttattagtaacaacatttacaaagatagctttttaatgctgagttgtatctgatttaatgcagtcagaaagaaaaaagaaacatttatctcattttgctgatctgtcagattttgcttaagttaggagagcctgcaatttcaagcccagataactggaattccatgaataaacacagaaagacaggagaaaggcaaggaagttcaaaaatcacagtctggggggaaatcagtagagtaagattaccaataagtgaaatattggtcatatgatttcttagtttccattagttatgcaaatattttactgttaatatttagattagtgttttagaacgttttgtagagactgaaaagcaaataaataattgcattagcattgttaagtatcagtgttttctgtttgacaaataatcgtacagctgtgttctcaggctgcaataacaaaacaccagagactgagaagctgaaacaacagaaatttgtttctcacagtctggaggctggaagtccaagacagagtccaagactctcgccagcagcgagagtttgattgtgaggcttctcctcttggcttgtaggtggctgccatctctctgtgtgctcccatgccctcttgtttgcatgcacagggagggagggaacaagctctctggggtctctccctataaggacaccaaccttagcagatcagagccccaccatgacttcatgtaaccttaattacttccttagcagccccagctccacagtgcaggttggggcttcaacacgggaatttgggggtgaagggtgggacacaaacattcagtccataacaatggcccaccaaaccatgaaagtaaatagaaaaaaaatcacagttcaagaataacataaaacttaactaggtgtgttatagagcaatgcatagaactaagctgagaagttaaaacataaactcattgatttttaaagacaatctttcccaagtctggttcaccttagggctgatacacaccttcagaaccagattttggtctctaatatcatcttccactgaaagccagggcaaacaggtttatgttcatttcatcttggcctataatttctccttaaagtgaccattaatattcactatcacaattaaggcttggtctgggccattctgagaacaagctctggagaccacaattttaaaggattaaataatcataacggtattctttgtcctgacaaaattattaatctgacagtgactgaattatcttcggactctcccaagccctaaatgaatacagcaaagataaatgtcaagaattcaggaaacaattgcttctgctacggccagtaagctcctaacagaccatgcttctgcagaaaacgattctggacaaatttttaaaagcaacaaactgcatgaagtcacttaaaaaaagaagcccagccttggaagaaagaaaggccacaggctgagtttcttatttttatggcttttacccaaaatgcaagacacagatcggcattgtgcaggacagctaaagttcctttagaaaaccaccatctttctggctggaagagtcaggggtcagaatggggggcagccaccgctgctgaaagggttggggaaggaacccctgaaaggagagccagaaatgggggagctccaaactctttgtgtcagctccgtccaaatctctgacttgtgaactaaaaagaaaggtttctaccatcagcagactgtcacccatagacatttacatagcattttgatttggagttcttcctaatggccaccccacggaaaaatatacaggtgttgttttgccctggaagccagacagatcagaacattgggtaagatagctgggtcagctgtccttggatggatcccaaacactatgctcctttccaggcctgagaatcgccgaacactgtccaacacaatgtgatcacccaacatatcacatgcatcactgagctgcaccacccttttcttcctcattgctttcaagagctcatacttatagtgctccacttcttttgcggtgctgacaagcacagcaacatcctttggagaatagcccctatcaaagaagcgcctgcacgtgtctgccacacaggtcattatttgctccacagtcaagtatttcttaattcgtaaggttccctgaacaccctgggaccattcggcttcaggaaatacctcgaggcacccagtggggatgttaaatgaaggattacttctaattacttgcatttctttttgtaagtacttggctattggatctgcattgcgaactattctggtgagctcttctcttggatattggtctgagagaggagggaggccactgcaatccaagtggctggtctgaaagtaatccagaaagatccagagaattcctgggccaccctttgctctccgagtgatgctttttgccttcccataccagtccccatcttcagtacggaaattctgagcttcgtcaatgacgatgtgttgaatgtgttcaaagttttctcttaggaaagttttccgggtctctgctcggcagatatttctatcactgtaaaaattaaaagaacacactcaggttttctctaaaaaaacaaggggagaaaataattgtatcatgttcctccgagcacagtacattaccacagatcattttaccactcaattctcaagaaagacggtgacttagcagaaaaaattaaacccagattaaataatacttagagacgtaagatccaactgcttacctgataaagttcctcagaggctggttttcacaaacgtagagaattctgtgtgcctcacagtgaaacacattcctgatcttctccatgatcttcatggccatgatggtcttccctgagccaggtaagccgtggacaaacaactctctgttcttgcggaggcttctggagaatatctcatactgctgggctgtgagcagatttaaaacctcacagccgagctggtcactcaagagagacctgaagccgagtaagacaatcacgagggactgcagcagggcttccatgtgctgggtgcctgcaaggctataggacgcagggtaatccatcggagacactgcagcctccaaggcctctgcgctgctctcaggactcaggcagaggaccttggccctgacacacaccttcccggtgtagccccccatgttcactagcttctgcttcaaagtaaaggcggtgcgagtgcagtagtcctggccctctgcatcttgctccctgagaatggtgtagagaatgggggtgctgttctgtgctatcagcagagcatcacagatgactcctggcttctcctgcaagttcaggtccacagcccaacttctagagaagatcaaaattccccgaaagaaaggttgcatttgcttatttattaactcctctagtcctctgtgctctgagatcaggtccctccagagtgactctggagtatatcgcaaatatcctggtgggactgtatgtgaaaagaatgataaattagaggaagagaaataaccctattgattaagatgactaattataattaactaattgattaactaaatgattacttatagaagtttcaaatactattttataaatattattatattatagttataaaggaaaagaacccttggaatatctggtatacttcatctaaacccatgtgttttttacaacttataaccttgggaaattccttagcctaagactttgctgtctcatctgtaaaacaaaactaagaatagcacatttcctatgaggaggaataaatgaaataacataaaatgtttggctcattgtagctgcttgagaaatgttggttctcctcctcccctttctactttcaaagtacctgaatctcaaaatgccccattgctgggagtagcaggagccccccctcctccactgccacaggaagaaggtagtcattaactccatagttgcagaggagagggagtcatattaaaacctttgttggcagcgaatttcctgcagtcctggactggaagattcttaaagctatctctcctgaagcagaattcttgcatcacttaaagatcaacgtatggctccccactaccacaaaagtcttccctgtgtcacaggcaaacaagaaataattatgtgacacgagaatatacttgcattggaggattatgaacttatttcaatgatcaagggttccaaagtgggagggggaggaagataattgttgtcctgttgtggtagtgttagagtacaaacccaaatcaagatttgtagtggtaatttcaaatgaaattacccagattttattggtaattgtttcttgttcattgttgctagtgctttctcattcgtaccaggtgctcacacgacttgattatccctgcaacctagatgacagtaggagatagcatctattatgagacacatccagattttagagatgttaaaatatagggggagatacacatcttagaatggataaaataggataattgagtatatgtttaaaatgaagctttggaaaccaaagaaatgtaaaataagaaaatacatcatttgttgattgttaccagggaatttgcatgtatctctggtcttcacaaattttccaaggatgacatatttattcccatcttcatatgagtagataaggactcaaagaggtcaagtgagagctgggtgcagtgctatgggcctgtagttccagctactcaggaggctgaggtgggaggattgcttgagccagggaatttaaggctgcagtgagctatgactgcaccactgcactctatcctgggcgacagagcaagatactgtctcaaaaaataaaaaataaaagagatcaagtgatttgcccaacatcacaccactaggaaatggcagggcgagtctgaacccaagtctcttggacatcggatcctctactgtttttgccctgccctgcaagtcacagactactcctgcctgataaatggtaaaagtcactaaaacacttgatgtttatttaccttatcattgcataggtcttctttttctttaattgtataatggagcatgcttctgaaggaaattataggaagataagaagtgcttctttcatttctttgatattccacataacagtaatgatagggaccagactaggtgttcaattaatgccatcattccaggtgcaccagagtagtcaccactccccatgtgatttgaggactctgtgcctttgcacaggtgtgctctgaaactctgaagacttccaccttgatcacttgataaactcctcaccctccccagaactcccatattcatccttctgtcctcagagctcccactttgtatccattctgggaactaatttcaccatggatctagggaatctttagaatcagcagtgaagggtccagggcagttgttctcaaaccataagaaatcaatcaggtgaggtatcctaaaggtttaggacaccaagaggaagaacactggagctggctgattctgacctactacaccaggccctgactatctttagtaccagtaactccagttatagacaaaatttctatttgagacaatcattgcatttcttccaagagaagcactgacagcattgattctgaagccaaattattgtcaatcaatgctaataattagtgtgctaagaacatctttattcttaatatctggattctaattgtaaaagtataaacatagtttgtttaccaccattaatgttcaaaatctaataacaataacagtgttccaaaaatgaaaattgtcttttaaaaaaataactttagttaatatattcctataccaaatacccaaacactcctactctcattttcttaatttcctgccttcccaatctcacccttctcccttatcacagatacttttaagtttcttgcctattcttccgaaattactttatgcaaatacaaacaaatattctgccctttctttcccaacaggtagcaaaccattcagcaactacttttttcttcacttagcaatgtatggtagagatctttccatatcaatgcacaattccttattcttttcttacagctatctaacacagtattttatggatgtaccatatcttgtttgaccagtccctattgatgggcccttgagttttccctccagtcttttgctattatgttaatactacagtgagtaaccttgtatgtttggtgtgtatgtaagcatatgtagcatacacacacacacacacacacacacacacacacacataataaaatcccaaaggttaaatgcatttgtgattccaatatattaatatattgccaaattgtcctccaatggagttgtaccaatatggactcccactagcaatgtacaagaaggtgtgtttccccacaactagcaaataagagataatgtcaggttttttcattttttaacaatccagtagacggaaataattctccttttaatttacatgtctcttattttgattaatatttagcatcttttcaaatgtttcaaagctgtatgaattttattttctctggactatccgtgttgatttttctgtgcgtgtgtgtgtgtgtgtgtgtgtgtgtgtgtgtgtgtgtctgtgtccttatcaacttctggaagctctttatatattagagacactggccctttggttgtgatacgggttgcaaatattttttctactggtcatggtcatttgactttgttcttagtggctttactcatgcacaatacttgttatttgtatgcagtcatatataacagtctttacttttatggttcacagattttgaatcttgatttttttaagtctaacgcaaaaattataaagatgtttgcctatgttttcttctagaacttttctggctttttgttttaaattcttgatccatttgtagtttatgttagtatatgaagtaaagtatgagttcatcttttaaacagttaattgccaccaagttaccctatgtatttatgagcatgtctgtttttctctacttacttgcaaggccagtttcatgataaactaaattttaatttgtgtttctgtgtatttccagatcctacattctgtaactttggtctaattatatgacaatacaactctttttattatttatatatataatatatatttaaatatatataaataatatatatcatatataaataatataaatatataatatataaatatgaaataataaacataaaaatataatataaagattttaaaaaacaaataaataataaaattaaaaatatataattatttatataatatatattttatatatctatatattatagttatataattatatattatatttatatatctataaataatatatattatttatagatagcttcccttgtttttcaggttttaattttccagctgttcttgctcatttagtttttatgtttagatttaaataatctctttttaaaattgatatataaaataacttcagaattgacaactttgtgatgttgactcttccttcaaagtatgtaacattccctgattcacttatgcttctgtgtccttcaatattattttaacttttgcattagataggtttattgcagatattttagctttttgttgctattgaaaattgggtgttttctttcattatatgttatattaaagatactgaattctgcatattaatttttatagtttcttcttataatactaatataagtacttatattcattctgaattattttactgtttacagtagttttctttgattatcatgaattctccagatatatagtcctatcttcttccattttaatccctctaatttctttctcttatctaactgtattggccaattaatattacattgtacttgtaatatgcacatggctgttttgttcctgaatttaatagaatgcctgtaatctctcccaattaacatgatgttcttggtggacatatatatacatgtaaatatatatataatgttaaagaactataggttactattttattgaggacctttaaaaaacaacatgtattgagctttttcaaatgcctttttgatgtattagaaaacaaatatataatttatttgcatagatacacagaaatgatgaattacattaactctttaaatgttgacacatgcttgtatttctggaattctgtctttgcatcctcattaataagtaggattaatctgagttttccttttccttttccttttcctttttttctatctttaacaagttttacaattactgttattcacacttaaaaaatagcttagggctgggcacagtagctcatgcctatagtcttagcttctcaagaaactgaggtgagaggatcacttgagcccaggagttcaaggctgcaatgagctatgatcacatcactgcactccaacctgggtgacagagcaagatcctgtctcaaaaagaaaaaaagacttgggaatttgtgttatttttctatgaatttagaacaatgtaaatagtgtaaaaaatgcctatttttcaaaagtttggtagaagttttagaaaactgatttttttataccagaataataggctgttcctctatgggcatatagcccattattttgtcttagttataatttattccatggtaataagctctactaaaatggatcttattgagcttaaaaggtgattagcagcgcttaatagatttactgttagattttacattgtttattgtggacagtttctaaaatataaatttgatatgtaaatgaatgcaaggaccttggataaaggaaaaaatgaaattctaatgggggcagtcattatctattaatttaatgatccttgacagatatttacacatatataggacatttatgtatcaattatagtgccagataagccactgacttactgcacagatttaagcaagtggttttccctctctgggattctacaaagacagcaatggattcctaagcaaagcctatcatgggaacaagggataagagtagagaaaaggcgttgaccttggtcctgaattattgtgtttgtgctgctacgtgattgtcctaaacccaaaacatgggaagaaatgcataatccatctccattttaaatgttttgttttccatcttgacctagatttatattgttttctcttatttacaaccaccactcccgtggaaaatctggcaagggcaggcagttttttggctgctctctggtgcagcatatgactagtttgactagataaaaggtttccaatctagatgaacataaaatcatgagggtagtttgagaaaagtacatattgcaagccactctccccacatattccaatttgttatgagtggagtagggactcagatatgtgtccttttaaaaatgaccagaaacactgatgatcagccagatttgggaactacaagaacaaatagtctttaagggaaataatgttcctggattctatgtgtggtcctgccttagccagtggggtcagtaagggttcatttctaaaccacttatcaccaataggattgtaacatcatcacgtcttacaaatgggtttgcagagcactttcaggattttacaaaacaaatattatagtttaatctccctttatcctaatatagaaactggctggtgttgagaagacaaaccataattacctgaaaataaaagttgctggagttcctttttatgttccaggcctttcttggagtacactggtctgctaaggggaggcccactagatagactcagctgacattcaaaatcttcagacaactgtagaagatcttaagaaagaaaattcatgttattctgacgtgttaatctcttcatactgaaagaggctctatcagtaggtggaatgtgtgactttctaaatagtttgacttgagagataatatcaaaataactctcctctcactcacttactctagataagtgcctttattgcatatcaaggttgccaaaacccaccctgaaaagccattatttggaagtttaactgtatttctccattcagtataattcttcattctctgtatctggttagcattttgtttgcacacctgttacgttacctagctcattcttttagtactgctgtctgtgcatgtatcttgttttacatcccctctccaactgccaccacctctcctgaacccaactctcaactctgttcaatatcatctcatcactgatttgtaattaccattactcacacttaaaaaatagcttagggcttgggcacagtagcttgtgcctgtagcctcagctactcaagagactgaagtgagaggatcacttgagcccaggagttcaaggctgtagtggactatgatcacgccactgcactccagcctgggtgacattctgacacctatgcttattcctgaagttaaaatgagaaattgtgtgaaatcaaaggacattatagagtgcattaactttttcatgtgctttggagattggagtcagctttataatatctcctttccaagtacacatccactttactcagaagattgtgtcccaatttttatgttctctctgtgtttctccaggcttagggtgttctcagttgttctagagacactgagatagcccactagcctgccaaattatagcatgatggggtaaatatagaaacatgtttgggaagcagtagtgatgcaaggcaagaaatatttcaaactgttaggagcagaggggtagagcagattatacctgctggcatagagcataatgggtacatggtgatgagtggaagaaaaggcaaaatatcaacaggataaacagagacacaggacaatatgaaacggtactgaggacaaaccttgaatacacccctacccccgtgaccctcatcaccctgaaatactttctgttcttttgtttttgagacagggtctcactctcacccatgctggggtgcattgctgtaataatggctcactgcagcctcaaactccagggctcaagtgatcctcccaccacagcctccgaaagtgctggaattataggtgtcagccaccatgcttggccctgagctactttcaaattttcctgagctacaaaatcaacaatgtcctcaaggatcaagagataaactacatcttaatttaggcagggtactattataaggtgatagcaaacttcaatgcaaagggcttttttttttgagacagagtctcgctctgtcacccagactggagtgcagtggtgcaatctcggctcactgcaacctcctcctcccaggttcaagcaattcttctgcttcagcctcccaagtagctgagaccacaggcacgcaccaccacgtctgactaatttttctatttttagtagagacggggtttcaccatattggtcttgaactcctgctcaggtgatccacccacctcagcctcccaaaatgctgggattagaggcatgagccaccaagcccagcccaagaaagcaaccccagaaagcagtactatctatgctggtgatggtttaataaacagatctagttgagaagagatccctcgttcatagccaactgccagtttctgttttataaatcttcctgccatggacaatttcaagctcctaatggattatcactaaatacagagttggaaagccatgcacagtagcactccattttatagtattcccaccacacagatacaatagatgtaaataatctctcaagcaaagataatagtgaaatgtagcaaataattaggaagtggtgagtttgaatttattacatttgtttctgatacgatttatttaggtgcaagtatatacaatctaatttttagtaataactatgtttaacaactagctcaaaaattcctgaaaatttaataattgattctaaagccagtaagagccattccagtacaccattgcaagggtggccattctcaaataattttctgttcagttactaatgtagaaaattggccatttatagacatgtgagttaggtttctaatcacccaacaaaattttctcatgtatgaaaagtagaatacttggggattcaaaataaagtgttcagtggatgtaagatgttcaaagtcataggcagcaaaggaaaatttaatatgggaggtcccaaggatgtagaaaggacagggagggaggagctttctccctcttacctggatctgtgtctgtcatcatgcctacccatttctcggttgtcaggctgcagacgtacttgtcctccactatccatgaattgggagcttctgagaacactgcacagcagaagggatttactctgatcatgcaagcatagccatagagctctcccctttttaacacattcacaattttgagtgtgaaggttatcgggcgttggggttggcaaaaatgaacacaaggtagtttgtatatggcttgttctattttccttctcaaagagtcagggtcaacattttcttttgcacatcccaggacttccctactcttatcatccactccaataaaaagatagcctcctccagtgtttgcaaatgcagggacgtattctggaattgtcctttttacatattcttggaagtgttttgtagagaactgtttaaactctactaactgagactcaggaaaaggcaggatttcaccatattcaagatagtctttttggaaaattaggtcagcaggatccgagtttgggtcagcaggatccgagttagggagctcttggtatacacccttgtgaattttgtgaaaaggtccttcttccaagatttttggcttccttttggtcttcaggaaacagaatgcctctcttgagtccatggaacgcacagaggtctcagatctacggtataatgaagaactgaggctgcaaaggcggggcttgacagagcgatcttcagggaaagggccactgctccaagatttaacaaaaatgtaaaaacaccttccttgttgcttggtctcaaagaaagcctgcagatctgaagactgaataagctctctcaaagactgttctaaatccagtcccatctccacgggatgctcaaccttcttggccattcgaatcactcctcctcctgagtttaataaagcacatgcagcccgcataactctctccttctcttggtctctctgaattttctgcagcttttttctgttttcttctccaagagtcacttctcctacattgatgaccaggtctgggtaagatggttccacaaccagggggcactgatttgcctccatgttgaactcacagctgaaactattagaagaaatgaagtgttacatgcatgcaattcatttattaaaagggtatttattttgtgtctaatatgtgctgagagaagacaatagactagcaagcaagacaggagcaatcccttctctttaggagaagaatggctggcaaggaagggtgctaatgaaattagcatttaacatcatatatgatatgggctatgagaggaaaaatatactaaaggggtatctaaactaatctgaagatgatggttcaaaaagacttccaaggcaaaggtgacatttaaagacctgaaggatgcattggaattggccaggtgaagttatcagcattgaagaatggaagcagtggagcgcatgaagggcatgtgtacaatggcatgagactatctcagtttaggttgttgatgttccagtgaacaccaactttaggggatgagtaaaagaaaacaacattgaaaaggagacttcagaaaggactgactgtgaaaaaccagaggtaggagaaaaaccaagggcatatggtattaaggaagcccagaacaaagtcacctgcacagaggtctcagatctatggcataatgaaaaactgaggctgcaaaggtggggtgtgacagagccaaggtgtctaatactgctgacaggtacagctaggtgatgactcaaaagtgttattaggtttagtaaaattaaggttattggtgactttgaaaaatgctgttcagacacctgggcagtgggcaccaggaggcaataaaccagaggctaaggtcttacagaccagagttcatggagatggcttgaattccacttgtcattaaaagtattataacattaacctagatatttaatctttctaactctgttttcttacctataaaacatggtgcatccaccttaatatgcctgttattatgaggattaattgagaataattctcaataagtatttaacactatattttggttcacaggtgtttagtaaaggaatctatattaattgtccatttcacaatgagtcaacgaataaatgggaggtaaggaaatagtatcatcaaatacgcacaacttgttcactatatgaagctataaaggggagaggtaaaaagaaatgtagctggaggaaaagaggaagttaaagaatcttattaagatgggaaaggcctgaactgaacatatttagatgggaagaagccagtagggaagtgaaaatttaaagaggtagaaggaagttgggatgattgagacagtgaaagccctgaaaagagaggtaaggaaggaatgtgatccaggatgcagaagaaggtcaggaggaggagaaatggagataataggcatgggcaaaggtaggcttatcgctttggtgggaggaagctgaaagagtccccttctgatagcttcacttttctctttgaggtaggaaataaagtcaccccctgagacagaggcacttggtataaaaacaggacaaaaatattttttgcgtgtgagatggggtctcactctgtcatccaggctggagtgcagtcacagctcactgcagcctcaaactctggggctcaagtgatcctcccacctcagcctcctgagtagctgggactacaggcgcacagccactatacccagctaattctttaaaaatttttttttttgtagagatgggggtctccccatgttgcccaggctggtctcaaactcctgggctcaagcaatcctcctgccttggcctcccaaagtgctagggattataggcatgagccacaatgcccagctgacaaaaacattttaataatagaatggagacagtttgaaacagacattataaagaacaagaaagatatttgacatgggaaacaaacaacttacaatggaagattaatacagcagacaaaataagtaaatcatatcttcaagtataaataaactctcaaagcatgatgataaatttaaaaagcaggtttgcaaaaaataatatacaatagaatagcatttagattaaaatattttaaaaactgtaataaatacgtttatgtttagtaaaaggagaaaagcatagtgaataaagatgcacttattttttacagaggttacaataaggatggaaaataatgagattggagaattaagcctttaactgtacatacaatgctgtaagttcagaagaaaaagcacctgtaccaaatacatctcagaggtgggtgggacataaatttttgttgttttcttgtctttgcacttctggaattctgaattattacaacattttttaaaagccatcctccttcaaattaaaaaggtagtcgggggaaagggtaggattttatcacagaagtaactgaaatctggactatgcattctaagacaaataggtcagggaatgagggtggcagggatcgcattgataggaacgaagtaaaaaggtgaatggattataggtctcaataagggaaataataaagaaggagcgtgaactttgaaataaagattatgaataatcaagattaagaattgttcaaaaagatcaatataatcaacaaataaccgatatcactatttgaaaattattatttaaaacaaaattgtaaaaaatcagtacaatcaacaaatactttgcatcattatttgaaaattattttttttaaataaaaattttaaatacagtcaacaaataccttgcatcattattggaaaattattaaaataaaataaaatttaaaacaatcagtaaattcataaactattttgaagtcatcaaggatatatacaatatgtagaagcagactatcacagccttattttcctttcctacaaaaatccatcctatactaaaggcttggaattacaagtctcagtgggtgctagtaactctgaacagataaggtggatgttattgcaggtgacagaaggaatgagatgactgaggtgtgaagacatttagaagaaatttgttagataaaagtgaaggctgggccgggtttggtggctcatgcctgtaatcccagcactttgggaggctgaggcaggcagatcacttgagcctaggagtttgagacgagtctgggcatcatggtgaaatctcacctcctcaaaaaatacaaaaattaggcaggtgtggtggtactcacctgtggtcccagctactcaggcggctgaggtgagagaatcacctgagccttcgagacgagattgtggtgaaccaagatcgtgccactgcactccagcctgggggtcaaagtaagaatctgtctcaaaaaaaaaaaaaagaaggctggcacatccacattcttaccaccttgcctagtttagacccttgcctacaaatttctatttctcaaaattccattctgcattccaagaccattgaaacatctttgtcaagttatttgtaaaatattcctttcgatgtacagggatttcaaagttaaatattttctctgccccataaactttattgtcaaagccaatagattatagtttttggttggcaattgtatttaaacagcaaccccaccatctgcttagattcttttgcaggcaaaaaaggcttagggagctctatctcaagctctttccttaggattaaaggaattataatcagcatcacttgcacattttttgtaaggtagagatattgtcccatataaatttgaaatcctaaataaaattaaactaagtcaataagaaattaagaattcagaaaagaaactcagtacacttacaaaagcacttcagaaacaaaagcacctgattctagtcagtttacaggataactttttcaaacctttcagtgtagccagagttcccaccaacacagtgaattagcaccacctgctatctctttccaccaaaagcagtcctgaaggctatgtatacagaaacctatgtagacagaggtaacagagttcaaggattaagactcagttttcctaggttcaaatctcagctctgccatttattagctgtacggtttccatttattagctgtatggtttccatttattagctgtatggtttccatttattagctgtacggtttccatttattagctgtccccatttctccccatgccccaggatctagtcctgcaggacccctgatggagcagtgactctgatgtggacatgcagggacaaccacccccaagcgaggggctcagtgggtagcatctgtgcatttctcccctgccaagaaggcttacctagtttgctcagcaaactccctaaaaggtgaggaattagcctgggaaaactttgcaatgtcaaattgtcaagtagtgcccaattttctgtatgcttctgggtggttcttatttttttgttttacttcccctttccttccatcctcccacccatctcccctagatcacaggggattggctagcctcagatagaaactgaacagaaagggaaatgggagggcagaacaagacggtgtaatagaaggctccacctaccatcccccttctccagcagtgaccatgtggtgcagagaaatctgtgtgcttggggaagggagggcacagcaattgtgagactttgcattgaactcagtactgccctgttacagtgaaaagcaaaaccatgctgaatccagcatatacctgcccatggaggcagaatttggaccagccctagtgagatggaaattgtccatcccagcagttgaaacctgagtttcagcaagcctcgccactgtagctgaagtgctagggggttctaaataaacttgaaaggcattctaggccacaaggactgaaactcctaggcaagtcctagccctgagctgagatcagagccagtaggcttggagggcacacgacctactgagataccagctggggcgactaagagagtgcttgcaccacccctcccccaaccccagacagtgtgactctcagctccaaaaagatcccttccttccatttgaggagagaagagagaagactaaagaggacttctgtcttgcatcttggatgtcagctcagacacagtaggatagcacattggtcagggtcatgagacacccattccagaccctatctcctggacaacatttctagacacactctgggccagaagagaaactgctgccttaaagggaaagacccagtcctggcaggatctatcacctgctgactaaagagcccttggtccctgaataatcagcaacgatacccaggtaatatgccgtgggtcttgggtgagactctgctggcttcaggtgagactcagcacaaccccagctgtggtgcatacaggcagagactctttctgcttgagaaaagcagagggaaaagtaaaggggactttgtcttgcaccgtaggtaccagcttagccacaggggtagagcaacaagtaggcccttggacagcatttctggacccaacctgggccagaggggagtccactgtcctgaagagtgagtcccagacctggtagcattcaccaccagttgactaaagagcccttgggctttaagtgaatatcagcaatagctaacagtactccctgtgaacccgtggttgtgttggccacagggtcatctcctctgcctgtggaaaaaggagggaagaatgggaaggactgtgtctcatgatttgagggccagctcagtcccagtagaatggaacaccaggtagacttctaaggttttcttactccagtccctggctcctggatagcatctgtgaacccacctagggcctgggggaacttgccactctgaagaaaagaacacagcttggctggcttcaccacctgttgattgtttgaaaagataaacaaaattgacaaacctttaccaggctacctgagaaaaaaaggagaatacccaaataaatgaaatcagagatgaaaaaggagacaatacaactgatactgcagaaattcaaaggatcattagtggctactatgagcaactgtatgccaataaattggaaaatctagaggaaataaattcttagacacatacaacctaccaagattgaaccatgaagaaacccaaaacccgcacaaaccaataagaagtaatgagaacaaagccataataaaaagtctccagcaaagaaaagtctgggacccgatggcttcaccactgaattctaccaaacagttaaagaagaactaatatcaatcttacccaaactattcaaaaattagagaaggagggaatacttacaaactcattctataaggccagtattactgataccaaaaccaaagacacatcaaagaaaaaaaattatggaccagtatctcagcaaaatactagcaaacttaattcaacaatacattaaaaagatcatttatcatgactaagtgctatttatttcagggatgcaaggatggttcaacgtatgcaaatcagtcaatgtgatacatcatatcaacagaatgaaggacaaatgccatatgatcatttcaactgatgctgagaaagcacttaataaaactcattatcccttcatggaaaactcctcaaaaaactgggtatagaaggaacataccacaacataataaaatccatgtatgacagacctacagctagtagcatactgagtagggaaacactgaaagcctttcctctaagatctggaacactataaggatcctcactttcaccattgttattcaacatagaaatcctagctagagcaattagacaagagaaagaaataaagggcatctaaattggaaaggaagaagtcaaattgtccttgtttgcaggtgatatgatcttacatttgaaaaaaacctaaagactataccagataactattagaactgataaacaaattcagtaaagttgcaggatacaaaataaacatacaaaaatcagtagcatctctatataccaatagtgaacaatctgaaaaagatataaagtaatcccacttacaatagccacaaataaaattaaatacctaggaattaaccaaataaatgaaagatctctacaataaaaactataaaatcatgatgaaagaaattgaagagccaaaatatggaaaggggaaatatacccatgttcatggattggaagaatcaatattgttaaaatatccatacttcccaaagcaatctacagattcactgcaatctctattaaaatatcaatgacattcttcacagaaatagaaaaaacaatcctaaaatttatatagaaccacaaaagacctataatagccaaagttatcggaagcaaaaagaacaaaactggaggaatcacattacctgacctcaaattatactacagagctacaggaaccaaaatagcatgatactgacattaaaaacagacacatagaccaatggaacagaatagagaacccagacacaaatacacacacctaaagtgaactcatttttcacaaagatgccaagaacatacactagggaaaagacattctcttcaataaatggcactgggaaaactggatatctatccgcagaacaatgaaactagactcctaactcttgtcacatataaaaatcaaacgaaaatgggttaaagactcaaatctaagacttcacactgtgaaactactacaagtaaacattgggtaagatctccaggacattgatctgagcaaaaattcattgagcaataccccacaagcacaggcaactaaagcaaaaatggacaaatgggatcacatcaagttaaaaagcttctgcacagcaaagaacgcaatcaacaaagtgaaaagacaacccacaaaatgggaggaaatatttgcaaattaaccatccaacaagggagtaataaccagaacatatcaggagctccaacaactctatagggaaaaaaatctaataatcctattgaaaaatgggcaaaagatttgaatagtcatttctcaaaagaagacaaatggcaaataggcatgtgaaaaggtgctcaacatcactgatcatcagaaaaatgcaaatccaaactacaatgagataccatctcatccaagttaaaatggcttttatccaaaagacgggcaataacaaacgctggcaaggatgtgaagaaaagggaaccctcaaacagtgttggtgggaatgtaaattagtacaactattatggagaacagtttggaagttcctcagaaaactaaaaataaagctaccacacaattcagcaattctactcctaagtattgacccaaaagaaaggaaatcagtatatccaagagacatctgcactcctatgtttcctgcagcactgtttaaaatagctaagatttggaagcactctaagcgtccatcagcagatgaatggataaagaaaatgatgtgcatatacacaatggagtactattcagccatagaaaagaatgagatccaatcacttgcaacaacacgaatggaacttgaaatcattacgttaaatgaaataagccaggcagagaaagacaaacatcacatgttctcacttatttgtggcatctaaaaatcaaaacaattgtattctaagagcagaaggatgactacctgaggaagggtggtaggagggaaggggtgaggtggggagagttaatgggtacaaaaaaattagaatgaataagacctactatttgataacacaacagttattatagtcaatgataacaattgtacgtttttaaataacttaaagaatgtaactggattgtttgcaactcaaagggtaaatgcttgaggggatgaataccccattctccatggtgtgcttatttcacattgcatgtctgtatcaaaacatctcatgtaccccataaatatacacatccactatgtacctacaaaaataaaataaaataaaataaaaactaatgagcataattggattgttggtaacacaaaggataaatgcttgaggcgatggatacccccatttaccgtgatgtgattattaaacattacatgcctgtcttaaaatatctcatgtaacccataaacatatacatctactatgtacccacagaaattaaaaattaatttaaaaaaaaagaaaagaaagggaaatgggctgcgacagatgtgccctcttggaaaactaaaacttagagctctttgtccttctggggtagcacgtgtattctacagatcttgtccagagggagacatttttctcatttctcccccctctagattataaatctccccgcagggcaatggcaattctaattctgccttttagtttctatattaaggaaaatagtttagagtggttggtcggtcacatagacagctgtagaactagtttctcaagtttaaaataccaataactctgaaacctgagatctgcagccctgggagccaccaaggtgcactcagtggccttctaggcttcggttcctgctccgcgccccgcagaaaccgcggctggctggccaggggctcttccaacttccagcgggagcaggtgcacaggtcaggcccgccccgcccctaatgccttctacccccattacccacccccgccccgcccgccagtcctccatagtccgctttttagggaacctgctgagcaaactagctgggcccccggacaggggagaaaagcacagatacccccactccactccacccccagcccctccgcacccctccagcccctccccacaccccacaccctggctggggtggggtgggaagggtgctgctcccttctcgaacctggcactcgagttacagcccgacgcggattcggctgggctagaccctgaagcacgggtagaaacgcaactccggagtcccaggctgggggcaaggaccctctctgacctctcaagctccagcgcttccgaagcccccttagcgtttccctggaggcgcccaggtcgagtccttatatactagcgggttggcgccatcccacgcacatcccacgcaggagatgcaagagccaatgggcgggtctgctaagcccgcgaactctgccgcgttaaattgcctagaagctcccacccttctgactgttgccacgtagttcttagtttccgggaatttggggattttttcctcccccttcttcccacccttcctccgtctcctcgctccctccatccatctctccctccctatcatctatctattcatctatctggattacagcaaaacaaagaataaagattatgaagaaagagaagaacttcccaggcccaagcagctgtcggctcctgcgctcccaacggggtggccgtttccttcctcgcaccctcttctctcccggtgcctgcggtcccaccttccagatacccctcggagagtccagctgagctctcgccagagctttccccttccaacccgctcgacttgcccagatcccaagctgggcttctctctccatcgccccagaaagtgggtcttggagaccgaggcaagaatttgggcctccgcttctgttccagaccccggaccccttgccaaaatgcggcagatgtgcagattgggccgcgcttggttcctggctgggtttatggagcctgcggctgaggcaggctccgcagaccccgagccagagtgggatttaacggcggccggtgcgctgtgcttggtcaaccccggtaaccgtcacgctgctagtgatatgaaaaaaacctgccagcgttctgcttttctgccccgctgcagtctttagcacccgccaggattctgtccgagtgtttggattttgtaatcctcctgtctttggccaactccccatccttggcggagcgctcgcccttggccgggctccgtgctgccagccttgcggaaccctaggcccgggcggctctgtcggaggcccacttctcactgatgcggagtggcccgagggtgggagcagcggttaatgccgcactgattaatacaggctccagtgaaagcgaaagtaagaaaataaaacggatttcattatacatatacaatgtgtgtatggatacatgtacatacatattacacttatgtgtatgttacgcacgtttgttaaaatgaggtcataatgttcatgctgtttcataacccactttctttcaatgaccaccttttcatttcagtaaatcttcgtattctcatgttgcagcttctccatttttctttaacatgtttacagagagtctgtgcaaacctgtaccaaatccagaaccatgcatctataacgtgctaaaagattgtcaacctagaatcctataacaaccacaaaaaaggcctacctaaatggaggcaaagtaatgacttcagacaaaaaaaaaaaaaaaggaaatctgaaaatctgagggaatttgtcaccagccgatctttcttatgaaaaaatattaaaggaagttctttagctggaaggaaaatgatacctgaatgaaactcagatctacaaaaaagaatgaagagcacagaagatagtaaatatgcagataaatataaaaaatctcttttttactgttaaaattattctttttttacaatataacaaaatgtattttcattggatattaattatgaacccacaatgcatgtaaactaaatacaatacttcaaatcattctgcacaaagaaattacagatcacatttatttaataacaaaatgtctaattgtttaataaaatgtttttaggaacttacaatataattttcaaaaacaaagaataaaaatattaaatatatcactttatggcagaggacaacataaatttatttctgcaacacagcaggcaaacttttgtgctagaaacagtggagaaaaaatttaaagcaaaaagtcaggaaatggatgttcacaaatttctggttaactgaggctcaatagttattgtaagaaacgggcgtttgaacatcagattttaaaataaaatattttaaatatttttattttataatattttaaagattttatttataagattttaaaattttaaaatatttttattttataaaaataaaaacttcctcaaacaccagagtttttcacctcagcaaatgtcttttcctttgataattcataatcctgctgttcatttgtcacatatatgaatatctggtaacttcataaacaactaccaatggcacacttcaaatgctgagtctgttgaattttcttatatctttttccccaatgaacctagagcctataacagagaagatactgaaacatgctaagataataattggtcttagagagacttcacagcaagtatttaatgaaagccactacatttccagctctaaaaagagccagacagacacaatccctgcttccagagttcaccgttcagacagaatacagcagggcaagcactgattctgaatcattatgagctttgatttcatctttcaagatttacatagatactgatttcttctggaagggcacataaaatcttcccttacacacatcattctttggattctcataaggggtattttgaagtctgtatgttgacaaggccagtagatacttagttttctctaattgccttctactacttaagactatgtcaagtattttgttttccctttcagttctccccaacctctaccttctgcagtgttgtctatccagttggcttttctgtaacactttgctacacttttctgttccccttcactgttttcctccgttgctttcctccttaacagaagcctggtcatctaggtttccccatctttcctttcctggcttcttattcacatgagtgactaatcttagcacttccttaaaagttggatcttcaataaatataacttgtcagcactttcaatctgcatctccttgagcttttttttttttttgatcatcagatcttctgtgcaataatattctcttcctgaatgctatttagaaatattatcctcaaaacaccaatggtttcttgaagatacttgttttaaaagttgtatcaaaagagattgataaaggaatctataactcagcaaaggatgcttctactgtattgtgaattcccaccattacaaatattggattctgcaagtccaacattaaaacctggtatgagacatcaatttatacacataagagttacattattattttaatttttttgtggatactaaactgaaatttatataatacatgaggttttaatcttagaaaaagtaaatgataaaaatttaatatagttaattgttcactgatatgtctattgacttcatcataacctatatatttaattaaaaatcaaactatgagtctgcaaatcagatgctatcaagcaaattgccatccaggatccgtaattctttgtatatttttaagtcagatgaatatataagattcagtaaattttaatgttccaaattgttctcaaaaaaaaaattatcagaaccttgcagttaacacagttggctaattcatttccccccaatgaactacctatttgtgttgtgaggtagcaaagactatgatcttctgtgacagtagtagccttaattcttatgcattccctcttcatatgaagagtatgaacaacaaaaagggacagatgagtcacctttcattattcattgactcttagtgttttcatagtatgttaaatgcctgatttcaattttacaacaacaaaaaataccaatatttattctgaaaggcaatcgtatgttccaagtagcagatattaacaacttccaacatgatctctaggaataatccgcagttctgaaccttgttttagaaaaacatttccagcagtctgtgcaagatttattcctattccatcattggtaataactgcacttgttgcagcaggagctttaaattcttcggctgcaaactttaagactgctgtgaaaggtgtactttcaggaaagtacaaagtacactgagtactttgtatggcagctgcgtgtccgatgtcagcatgatcttaaaggaaaccttcgacatggtggtaccaggatgaatctagaacacacgccaactctgcggggtagcacgacttcctccactgtgctgaaaattattcttaaaataattaagtttttaaaggaataaaactatgtattgtggtgcttataatagaaatattttgtttttaggaatagaggaaatgggtgtgtattgttataaagctcttacataattcacaaagtcatatgctatgattaaactgtggtaagttgaaggtgcatattgtaagccctagagctaccacagaagaaatgggaacaaaaacatatagataataaaccaacagaggacttttccttatgactcctattttcttcctgtttttacaaaaatattatttttcctacctgtttttgctttatagacatgcagtggactttttccccataagttattggggtacaggtggtatttggttacatgagtaagttcgttagcggtgatttgtgagattttggtgcacgtatcatccaggcagtatacactgcaacatatttgtagtcttttaatcccttgtccccttcccacgctttccccagagtccccaaagtccactgcatcattcttatgcctttgagtcctcatagcttagctcccacgtatcagtgagaatatacaatgtttggttttccactcctgagttacttcacttagaataatagtctccaatctcatccaggtcactgcaaatgctgttaattcattccttttatggctgtgtagtatatatgtatgtatgtgtgtgtatatatatatatatatatatatatatatatatatatatatatatatatatgatggaatactaccgtggtgtatatatacatatatctcacagttcctttatccactcattgattgatgggcatttgggttggtatcatgattttccaattgcgaattgtgctgctacaaacatgcgtgtgcaagtatctttttcaaataatgacttcttctctggatagatacccagcagtgagattactggatccaatggtagttctagttttagttctttagggaatctccacactgttttccatagtggctatactagtttacattctcaccagcagtggagaagtgttccctgttcactgcatccatgccaacatctactgttttttgacttttttgttatggccattcttgcaggagtaaggtggtatcgcattgtggttttgatttgcattccctgataattattgatgttgagtattttttcatatgttcattcaccatttgtatatctttccttgtgaattgtctattcatgtccttagcccactttttgatgggactgttttttttcttactgatttgtttatgttcattgtagattctgaatattagtcttttgtcagatttatagactgtgaagattttttcccactctgtgggttgtctgtttactctgctgactgttccttctgctgtgcaaaagctctttagtttaattaggtcccagctatttatctttgtttttgttacatttgcttttgagtccttggtcatgaaatctttggctaagccaatgtctagaagggttgttccaatgttaacttctagaatttttatactttcaggtcttaggtttaagttcttaatccatcttgaattgatttttgtataaggtgagagctgaggatccagtttcattctcctgcattggactagcaaattatcccagcaccatttgttgaaaagggtgtcctttccccactttatgtttttgttggctttgtcaaagatcacttggctgtaagtatttggatttatttctgggttctctattctgttccattggtctatgtgactacttttatactagtaccatgctgttttggtgactatagccttacagtatagtttgaaatcaggtagtgtgatgcctccagatttgttctttttacttagtcttactttggctatgcaggttcttttttttggttccatatgaattttagaattgttttgttctaattctgtgaataatgatggtggtattttgatggaaattgcattgaatttgtagattgcttttgtcagtatggtcatttttacaatattgattctacccatccatgagcatgggatgtgtttccttttgtttgtgttgtctatgatttctttcagcagtattttatagttttctttatggaggtcttttgactccttggttaggtatattcctaagtattttgtttgtttatttattatttatttatttatttgtttgtttttgcaactattgtaaaaaggggttgaattcttgatttgattctctgcttggtcactgttggtatatagaagtgctactaatttgtgcacattaatcttgtatccagaaactttgctgaattcttttatcagttctaggagctttccagaagagtccttagggttttcaaggtaaatgatcatatcgtcagcagtgacagtttgacttcctctttaccaatttggatgccctttatttctttctgttgtgtgattgctctggctaggacttccagtactatgttgaagaggagtaatgagagtgggcctcctcgtcttgttccagttctcagagggaatgctttcaacttttccccattcagtattatattggctgtgtgtttgttatacatggcttttattacattaaggtacgtcccttgcatgctgattttgttgagatttttaatcataaagtgacactggattgtgtagaatgctttttctgcatctattgagatgatcacgtgatttttatttttaattatgtttatgtggtgtgtcacatttattgacttgcatatgttaaaccatgcctgcatccctggtatgaaacccacttgatcatggtggattagaattagaacaaaacaattctaaaattcatatggaaccaaaaaaagaacctgcatagccaaagtaagactaagtaaaaagaacaaatctggaggcatcacactacctgatttcaaactatactgtaaggctatagtcaccaaaacagcatggtactagtataaaagtagtcacatagaccaatggaacagaatagagaacccagaaataaatccaaatacttacagccaagtgatctttgacaaagccaacaaaaacataaagtggggaaaggacacccttttcaacaaatggtgctgggataatttgctagtccaatgcaggagaatgaaactggatcctcagctctcaccttatacaaaaatcaattcaagatggattaagaacttaaacctaagacctgaaagtataaaaattctagaagttaacattggaacaacccttctagacattggcttagccaaagatttcatgaccaaggactcaaaagcaaatgtaataaaaacaaagataaatagctgggacctaattaaactaaagagcttttgcacagcagaaggaacagtcagcagagtaaacagacaacccacagagtgggaaaaaatcttcacaatctataaatcgttttgatatattgttggatttggttagctagtattttgttgaggattttagtatctatgttcatcaagggtatcggtctgtagcttccttttttggttatgtcttttcctggttttggtattagggtgatgctggcttcatagaatgaattagggaggttccttctttctctatcttgtggaatagtgtcaaaaggattggtaccaattcttttttgaatgtctggtagaattctgctgtgaatctatctggtcctggactttttttgttgttggtaatttttaaattaccatttcaattttgctacttgttattggtctgctcggagtatcaaattcttcctgatttaagctaggaggcttgtatttttccaggaacttatcaatgtcttctaggttttctagtttatgtgtgtaaaggtgttcatagtaagggaggagaccacacctcatattgtcttatgcccaatttctgcctccaaagaaagaagaagtaaaacctaaaaggcagaaatgaaatccacaagcagacagcctgatgccacaccctgggcctggtaaagatcgacccctgacctaattggttatgttatctatagattacagacattgtttagaaaagcactgtgaaaatccctgtcctgttctattccgttctgattactggtgcatgcagcccccagtcatgtaacccatgcttgctcaatcaatcatgaccctctcacgtggacccccttagagttgtgagcccttaaaagggacaggaattgctcactcagggagctcagttgttggagacatgagtcttgctgaagctcccggccaaataaagcccttccttctttaactcggtgtctgaggggttttgtctgcggcttgtccttctacaatagtagccttgaatgatcttttgtatttcagtagtgtcagttgtaatatttcctgtttcatttcttaatgagattatttggattttctcttcctttcttggttaatcttgctaatggcctatcaattttatttatcttttcgaagaaccagctttttgttttatttatcgtttgtattcttttgtttcaatttcatttagttctcctctgatcttggttatttcctttctcctgctgggtttgggtttggtttgttctagtttctccagttccttgaggtgtgaccttaaattgtctgtgctctttcagactttcctcttagcatcacctttgctgtgtcccagaggttttgataagttgtgtcattattgtccttcaattcaaagaatttttaaatttccatcttgattttgtttttgactcaatgctcattcaggagcaggttatttaatgtccatgtatttgcatggttttgaaggttccttttggagttgatttccagcttcattccactgtggtctgagagagtgtttggtatgatttcaattttcttaaatttattgaggctcgttttatggcctaacatatgttctcttttggagaaagttccatgcactgttgaatagaatgtatattctgtggttgtcagatgaaatgttctgtatatatctgttaagtctatttgttccggggtatagtttaaatccattgtttctttgtggactttctgtcttgatgacctgtctagtgctgtcagtggagtattgaagtcccccactattattgcgttgctgtctatctcatttcttaggtctattagtaattgttttataaatttgggagctccagtgttaggtgcatatatatttaggattgtgatattttcctgttggacaaggccttttaccattatataatgtctctctttgtcccttttaactgctgttgctttaaagtttgttttgatacaagaatagctacccctgctcgcttttggtgtccatttgcatgaaatgtctttttctacccctttactttaagtgtatgtgagtccttatgtgttaggtgagtctcctgaaggcagcaggtagttgattggtgaattcttatccattctgtggttctgcatcttttaagtggagcatttaggccatttacattcactgttagtattgaaatgtgaggtacctttgcaatcattgtgctttgttgcctgtggacttgttttttgtttttctttttaacttgtatttttgttttataggtcctctgtgatttatgccttaaagaggttctgttttgatgtgttgccaggatttgtttcaagatgtagagctccttttagcaattctggtagtggtggcttggtaatggcgaattctctcagcatttgtttgtctgaaaatgactgtatctttcctccatatatgatgtttagttttgctgggtacaaaattcttgtctgataattgtttgtttcaggaggctgaagatagggcctcaaccccttctagcttgtagggtttctgctgagaaatctgctgttaatctgataggttttcctttataggttacctggtgcttctgtcttgcagctcttaaaattcttcccctcatcttaactttagataacctgatgacaatgtgcctaggtgaagatcttttcacaataaatttcccatgttttctttgtgtttcttgtgtttggatgtctagttctctagcaaggctggggaaattttcttcaattattccccgaaatacgtttcccaagcttttagaattctcttcttcctcaggaacaccgattattcttaggtttggtcatttaacataatcccagacttcttggaggctttttttgtattttcttattcttttttctttgtctttgttggattgggttaatacaaagaccttgtctgtgagctctgaatttctttcatctacttggtcaattctattgctgagactttttagagcattctgcaattctaaaagtgtgtccaaagtttcctgaatttttgatttttttttctttaagctatctatttccttgaatatttctcccttcacttcttttagcattttttggatttccttgcactgggattttctctggtccctcccttattagctcaataactaacctcctgaattttttttttttttttttgggtaaatcggatttcttcttggtttggatccattgctggtgaactagtgtgatttttggggagtattgaagagccttgtttcatcatattactggggttggttttctggttctttctcattttggtagcctctgtcagagggaaggtctagggctgaaggctgttgttcagattcttttgtcccacagggtgatcccttgatatagtactctccccattttcctaaggatgtggcttcctaagagctgagctgtagtgattgttatctctcttctgggtccagtcacccagcaagtctacccggctctgagctggtactgtggtttgtctgcacagaatcctgtgatgtgaaccatctatgggtctctcaccagtgcctgttctggtggaggtggcagagggtgcaacagactccatgagggtcctgagctttggtggtttaatgctctatttttgtggtggttggcctccttccaggaggctgcactttccagaaagcatcagctatagtaggccccaagtaggccccagtgtctgttcttccccgctttgtgtccatttgttcttatcatttagttcccacttataggtgaaaacatgccatatttggttttttgctcctgcattagtttgctaaggataatggtcttcagtttcattcatgatcctgcaaaggacatgatctcattcttttttatggcagcattgtattccatggtgtacatatatcacattttctttgtccagtctaccattgatgagcatttaggttgattccatgtctttgctattgtgaatagcgcttcaaggaacatacgcatcagtgtctttatggtagaaagatttatattcctttgggtatatactcagtaatgggattgctgtgtcaaatggtagttctgtttttagctctttgaggaattgccgcactgctttccacaatggctgaactaatatacactctcaccaaaagtgtataagtgttcccatttctccataacctcgccagcatctgttattttttgattttttaataatagccattctgactggtgtgagatggtatcatgttgtttttgcttttgtttttttgagatagatctcactctgtcacccaggctggaatgtaatggcatgatcttggctcactgcaacctctgcctcctgagttcaagcaattctcctgtctcagcctccagagtagctgggactacaggcgtgcaccaccatgcccagctaattttttgtatttttggtagagatggggtttcactatgttggccaggctggtctcgaactcctgacctcaagtgatccacccacctcagcctcccaaagagctggaattacagtgtgagccactgcgcctggccctcattgtggttttgatttgcatttctccagtgacaaataatattgaatttttttcatctgcttgatggccaaatgtgtcttcttttcaaaagtttctgttcatgtcctctgcccactttttaatggggttgtttttttcttgtaaatttgtttaagttccttatagatgctagatattagacctttgttagatggatagattgcaaatattttcttccattctctatgctgtctgttcactctgttgatagtttctctcgctgtgcagaaactctttggtttaattggatcccctttgtcaatttttgcttttgttgtgattgcctttggcatcttcatcaggaaatctttgccagttcccatgtccagaatggtgttgcctaggttgtattccagggtttatatagttttggttttacatttaagtctttaatccttcttgagttgatttttgtatatagtgtaaggaaagggtccagtttcaatcttctatatatggctagccagttatccgaggaccatttattgaatagggagtcctttccccattgcttatttttatcagctttgtgaaatatctgatggttgtaggtgtatggcattatttctggaatctactctgttccattggtctgtgtgtctgtttttgtaccaggtccatgctgttttggttactgtagccctacaatagtgtttgaagttgggtaacgtgatgcctccagctttgttctttttgtttaggactgctttggccatttgggctcttttttagtttgatatgaattttaaagtttttttttctagttctgtgaaaaatgtcattggtagttggataggaatagcattgaatctgtaaattgctttgggcagtatggccattttaatcatactgattctttcaattcttgagcatggaatgtttttacatttgtttgtgtcatctctgatttcttcaagcagtgttttgtaattctcattgtagagctctttcacctccctggttaggtgtattcctaggtattttattttttggtggcaattgtgaatgagatttcattcctgatgtgcctctcatcttggctgttgttggtgtattgaaatgctagtgatttttgtgcattggttttgtatcctgaaacttttctgaagttgtttatcagctaagagagcttttaggccaagactatggggttttctaggcatagaattatgtcatctgcaaacagggatagtttgacttcctgtcttgctattgggatgccctttctttctttgcctgattgctctggccaggacttccaataccatcttgaagaagggtggtgagagagggctttcttgtcttgtgcaagttttctaggagaatgcttccagcttttgcccattcagtatgatattggctgtgagttggtcatagattgttttatgtctgattgtgtggtggtcagttatagagtacatgccacgtagcaatgagaaaagtgtatattctgttgttttggggtggagagttctgtggaggtctatcagatccatttggtccaatattgagttcaggtcctgaatatttttgtttattttctgccttgatgatcttctaatactgtcagtggaatgttgaagtctcccactattattgtgtgggagtctaagtctctttgtaggtctctaagaacttgctttatgaatctggatgctcctatgttggttgcatatatatttaggatgggtaggtcttctagttaaattgaaccctttaccattatgtaatgcccttcttttttattttttttaccttttttggcttgaagtctgttttgtttgatattagggctgcaactgctgcttttttctgatttccatttgcttggtagattttcctccatccctttttttttttttttttttgagccaatgggtgcttgagaaatggttgtccaggagacagaataccattggctcttgcttttttatccagcttgacatcctgtgcctcttaaatgaggcatttagcccatttacattcaaggctagtatgttagcaagttgatatgtgtagatttgatcctgtcattgtgttgttagctggttattatgctggcttgtttgtgtggttgctttatggagtcactagtctaagtacttacatgtgtttttctgtttgctggtaatggcctctcctttccatatttagtgctcctttcaggatctcttttaaggcaggtctggtggtaatgaactctctcaacatttgcttatatgcaaatgatcttacttctttgcagaggaagcttagtttggctggatattaaacccttggttgaagatttttttctttaagaatgttaaatacaggccctcaatctcttctggcttgtaggatttcttctgagaggtccattgttagcctggtggggttccctttggaggtgacctgtgctttccctctagctgccttaaatattttctttcatttctctcttggggaacctgatgattatgggtcttggggataatcttcttgtgtagaatcttgcagaggttctctgtatttcctgaatttgactgttggcctccctagcaaggttagggaagttttcctggacaatattctcaaaaatgttttccaagttgtttgctttctccccacccctttcagggattccagtgacccatagatttggcctctttacataatctcatatttctgggaggtttattcatttctttttattcttttttctttatttttgtctgactgctttatttcagagaatcagtcttcaagttccaagactgtttcttcagcttggtctattctgctgttaatacttgccactgcattgtgaaattattgtagtgtgttttttcagctctatcagatcagttagattctttattatactggctatttcatctgtcagctcctgttttattgtgattcttggtttcattagattgggttttgctggtctcctcaatctcagtgatctttgttcctgtcatgttctaaagtatacttctgccatttcagcctagttacaaacccttgctggagaactaagtgtggttgattggaggacataagatactccggccatttgagttgtcagagttcttgtgttggttctttctcatctttgcatgtggatgttcctttaactatgatgtagattgaatacactcagaagacttcttttccggatgttttcacaggtcaaggctttgtgcagggtctttatgtatagctgacttatctttggtttgactggattgtatgttagcaaggtattttggtgctgaagctttggggtgtggtccagttggtggtgcttagcgtactggccagttaatagactcttgctcggttatgcggtttttgtgtttcctcacagttgcagctgtgctctctctcaatgctctgaaagtgtgagctcctctcccacttgagttctggctgtagattgtcttggcactcctgggctgcccaccacagctctggggtgatctcagggtttatgttgcctccttaacttggaggcaactgatgaagggaccttatttgtagtggtcatggccaagggtcttttgctggtctcctggaggctccaccctagagagatgcagatcagcaatcactcagtgcaatcggcccagaatggggggggtctctgctttgggccccagctggatccacatccctgcctagtgatgagcaggtgggtgggtggggaagcatgggagatgttctggcttcctcttcttgggtcaactgctgcttgttgaaggtgtggagaatgtacttagggtctttgctcctttgctagtctgagggcagcaggaatagtaccactgcagaggcagtggcagaggggctttcagtttcccatgggggttctacctctgagtaacatagagctgctgttactgggaatgttcagccagtagggtgaggtggctgcactactggcatgagctcagggtcctgcttgttgggaagcagggggctgagggttcaccaggaggagagcctggcctcttctccatatagtgactgtggcatgctgtagcttggttgcagccctcaggctctgtttcttccccagattgagggcagcaaggatagaaccactgctgtggcagtggcagaggggctgtgttggatgcctctggaagtctctccccagggtaattctgggccactctcagtgggtattctcagctgtggttacagtggctgttctgcagtaatgagctgggaaaactgcctggcaaagagtggggaatgggagttcccagggaataagggctggacttctatccatatggtggctgcagtgtgctggcagtgccagcatagtgactaggtgcttttttctttctccagcttgagggctgctaggtcactaacactgcaactgcagaggcagagggattgcaggttgactctgggatttcctcctcaaaataatgttgagatgcctctgattgaagtggccaggcaggggcaaggtggttgtgctggagtcccaggtcaggtagccctgcccattgaggagaagtgaggaccaggacctgcatggagaacaatacggccacttttccatcaggtgggtgctctgtgctgggggtctagaccagcccctgacctccagagagtctccagatcctgcagacagcaagggcgagggctgcaagacagcaaagacagcaatctacccctcccacttggagctctgtcccagagagttgccaagctgctactagcttgatagccccagtggggggtgtctgtagaggttttataaaggagagtggcttgtagggttttataaatggcagttccctttataatttgatagaaccttccaaacaggaacatttggatttaaaacccttcccatctccatcaacccagtgagcaataatattcaacttttcagaagacaatctttcctaggaattttaaaacaaaatgcaaatgtaaattacaaaatgtaaattgtaaaatgtaaatgtaaactaaatatattagtttactaactctatgtttttcataccctgacaacttcttttactctccagaaagactacatgttgtaagttaggagtcagttgtcctttatatacatagataaataaaacaaaatgcacagacataagagacaatgattaatcttgcctcactataagcaccctggcatagagttcatacacttcctccttctccctcggcaccaaagtagtacacaaacacaatgtgtattacgcaagatgtggtttggccattcctctccaaaacaacatttcatatgaattttaacaccaaagtaccaaaatgtgttattttactacctctaattttaacaaatgtctggcacttcagaacatctagaaagactagatattaacatttcaaaaaagttcttagcattgtcagctatgtatacagtagtggtgaataaaacacacacacacataacaatggtgagaatacgaaaatgtcttctaaatataaccagtcaggcatagaaccttcttctcttccttctcaggtcttccgctccatgtcctctaaccccctgaataaatgtggacttgtcactcttggtgtcacttccagaggtggtctgacaactccatttcaaaaagtcatctacagaagacatttattttctatgatttctttttaaacaaatgggaatatacaagatatgtgattttctaactctgtcataccatgggaatctctttacatctagaagggctagatttagcaaatgttttcttttaaagggttgggaggaaagttgagaacagctttttcatattaaatacacaggccttctataaatggccagtaaatcttcccaaagtgtggtgggcctttcaatgggccaaatgtggcatgttattctaccattcttccaacatcaacatctggtaggtagaaccaagacccaccctcaccaatgggtgctaaccgttccacccatcatgcttgggggactccactcaccttcctgtggttaaggcctttgtccagtgtcatcaggactaggtaggtctcgcccaactgggacagagtggtcaccccaggacccggatctgtgtggctccatggcctaaacaggccgccgagcctgcgtccgtagacctgccttctcgggccctacacaccctataaatggcctctgcgccctcccaaccgctaccatatttcctgcccccccccatacctgccgccacccagaggcgctgcatccaagtggcactcagggcttcctctagccccagcagggttgggcctgaaaaccccccaagtggcagagtcctggcaggatcatggcagggtccaggctgagagatggcagccacgatcaggtcatcttagaaataatattccattggatataccacagtttgttttttcattcacctattgagggacatcttgattgcttctagttttgggcacttatgaataaggcagctataaacatccacgtgcaggtttgcatgtggatatatgttttcaactcttttatgtaagtacctaggagtgtgattgctgaatcatatgtaagcctgtgtttatttttgttaagaagctgccaaccagcaatgagtgagagtttctgttgctccacatcctcactagtgtttggtattgtcaggttttttgtgaggttttgttcatatattttttggattttagccatatagttgtatagtggtaactcattgttttgatttaaaattaccagccgggtgtgttggctcactcctgtaatcccaacactttgggaggctgaggcaggtggatcacctgaggtcagaagtttgagaccagcctggccaacagggtgaaaccccatctttactaaaaaatacaaaaatttgctgggcatggtggtaggcgccagtaacctcagctactcgggaggctgaggcaggagaattgctggaacccaggaggcagaggttgcactgagctgagaccatgccattgcactccagtctgggctgacaacagcgggactccatctcaaaaataaataaataaataaataaaattaccaacccataatgttggccatttattcctacgcttaattgctatccataaatcactttgatgaggtgtctattcacatcttttgcccatttcagttggattgttttcttgttattgagtttttggagctctttgtgtatttgggatacaagtctttattagatgtgtgtttaccaagtactttctcccaatctgtggtttgtcttttcattatcttaatagtgtctttctcagggcagaaatttttaattttaatgaagcccaatggcctattttttttttcatgaattatgcttttggtgttgcatctgaacagtaatcaccaaatacaaagtcatgtagatttttcttctttagcctgatgatatatggtggattacattgatcaattttcaaataatagagccagccttgcactcctggaataaatcctggtatataagtcattttatatattgctgatactatttgctggaaatttattaagagtttttggtcaggcatggtgtctcatgtctgtaatctcagcactttgggaagctatggtgcgaagctcacttgagcccaggagtttgagaccagcctgggcaacatagtgagatcttgtctgtacaaaaaaaaaaaaaaaaaaaaagccagggatggtgacccacgctactcaggaggctgaagtgggaggatggcttgagtctgggaggttgaggctacagtgagccgtgatcgtgtcactgcattctatcctgggtgacagagtgagaccctgcctcaaaaaaaaaccaaaaaaagagttgttacattcatatttataaggtctattggtctgtggttttcttttcttgtactgtctttgtctggttttgatattaggtaataccataaatgaattcacaaaatgaattgggaagtgttgttctctcttctgtcttttggaaaataatatgtataattgatgttaactttttttaagtgtttggcagacttctctaatgaaatcacctggacacagatacttctttcttgggagcttgtaaatgacaaattcaatttgaggaagcagttcgtttcatgttttcttatttatgaatgcagagttgtttgtagtattacctcattatcctttggatgtctacgtggtctgtgttaggttttgaagggaaggcaagggttaaagaaagacacagggaaagcagcggctctacagcaaatgcaggctttatgtccagcataagacctacagaagtggggaacgggaggaggagccaagacggccgaataggaacagctccggtctacagctcccagcgtgagcgacgtgatttctgcatttccatctgaggtaccaggttcatctcactagggagtgctagactgtgggcacaggtcagtgggtgcgtgcaccgtgcgcaagccaaagcagggcgaggcattgcctcacttgggaagtgcaaggggtcagggagttctctttcctagtcaaagaaaggggtgacagacggcactggaaaatcgggtcactcccacccgattactgcgcttttccaacgggcttaaaaaacagcgcaccaggagattatatcccgcacatggctcgcagggtcctacgcccacggagtctcgctgattgctagaacagcactctgagatcaaactgcaaggcggcagtgaggctgtgggaggggcgcctgccatttcccaggcttgcttaggtaaacaaagcagctgggaagctcgaactgggtggagcccaccacagctcaaggaggcctgcctgcctctgtaggctccacctctggtggcagggcacagacaaacaaaaagacagcagtaacctctgcagacttaaatgtccccatctgacagctttgaagagagcagtggttctcccagcatgcagctggagatctgagaacaggcagactgcctcctcaagtgggtccctgacccctgacccccgagcagcctaactgggaggcacccccccagcaggggcagactgacacctcacatggctgggtactccaacagacctgcagctgagggtcctgtctgttagaaggaaaactaacaaacagaaagtacatccacaccaaaaacccatctgtacatcaccatcatcaaagaccaaaagtagataaaaccacaaagatggggaaaaaacagagcagaaaaactggaaactctaaaaagcagagcacctctcctcctccaaaggaacgcagttcctcagcagcaacggaacaaagctggacggagaatgactttgacaagctgagagaagaaggcttcagacaatcaaattactccgagctacgggaggacattcaaaccaaaggcaaagaagttgaaaactttgaaaaaaatttagaagaatgtataactagattaaccaatacagagaagtgcttaaaggagctgatggagctgaaaaccaaggctcgagaactacgtgaagaatgcagaagcctcaggagccgatgcgatcaactggaagaaagggtatcagcgatggaagatgaaatgaagtgagaagggaagtttagagaaaaaagaataaaaagaaacgagcaaagcctccaagaaatatgggactatgtgaaaagaccaaatctacgtctgattggtgtacctgaaagtgacagggagaatgaaaccaagttgggaaacactctgcaggatattatccaggagaacttccccaatctagcaaggcaggccaacattcagattcaggaaatacagagaacgccacaaagatactcctcgagaagagcaactccaagacacataattgtcagattcaccaaagtcgaaatgaaggagaaaatgttaagggcagccagagagaaaggtcgggttaccctcaaagggaagcccatcagactaacagtggagctcttggcagaaactatacaagccagaagagagtgggggccaatattcaacattcttaaagaaaagaattttcaacccagaatttcatatccaggcaaactaagcttcataagtgaaggagaaataaaatactttacagacaagcaaatgctgagagattttgtcaccaccaggcctgccctacaagggctcctgaaggaagtgctaaacatggaaaggaacaaccggtaccagccactgaaaaatcatgccaaaatgtaaagaccatcgagactaggaagaaactgcatcaacaaacaagcaaaataaccagctaacatcataataacaggatcgaattcacacataacaatattaactttaaatgtaaatggactaaatgctccaattaaaagacacagactggcaaattggataaagagtcaagacccatcagtgtgctgtattcaggaaacccatctcacatgcagagacacacataggctcaaaataaaaggatggaggaagatctaccaagcaaatggaaagcaaaaaaaggcaggggttgcaatcctagtctctgataaaacagactttaaaccaacaaagatcaaaagagacaaagaaggccattacataatggtaaagggatcaattcaacaagaagagctaactatcctaaatatacatgcacccaatacaggagcacccagattcataaagcaagtcctgagtgacctacaaagagacttagactcccacacattaataatgggagactttaacaccccactctcaacaatagacagatcaacgagacagaaagtcagcaaggatacccaggaattgaactcagctctgcaccaagcggacctaatagacatctacagaactctctaccccaaatcaacagaatatacatttttttcagcaccacacctattccaaaattgaccacatagttggaagtaaagctttcctcagcaaatgtaaaagcacagaaattataacaaactatctctcagaccacagtgcaatcaaactagaactcaggattaagaatctcactcaaaaccgctcaactacatggaaactgtacaacctgctcctgaatgactactgggtacataatgaaataaaggcagaaataaagatgttctttgaaaccaacgagaacaaagacacaacataccagaatctctgggacgcattcaaagcagtgtgtagagggaaatttatagcactaaatgcccacaagagaaagcaggaaagatccaaaattgacaccctaacatcacaattaaaagaactagaaaagcaagagcaaacacattcaaaagctagcaaaaggcaagaaataactaagatcagagcagaactgaaggaaatagagacacaaaaaacccttcaaaaaattaatgaatccaggagctggttttttgaaaggatcaacaaaattgatagactgctagcaagactaataaagaaaaaaagagagaagaatcaaatagatgcaataaaaaatgataaaggggatatcaccaccgatcccacagaaatacaaactaccatcagagaatactacaaacacctctacgcaaataaactagaaaatctagaagaaatggataaattcctcaacacatacactctcccaagactaaaccaggaagaagttgaatctctgaatagaccaataacaggagctgaaattgtggcaataatcaatagcttatcaaccaaaaagagtccaggaccagatggattcacagccaaattctaccagaggtacaaggaggaactggtaccattccttctgaaactattccaatcaatagaaaaagagggaatcctccctaactcattttatgaggccagcatcatcctgataccaaagccaggcagagacacaaccaaaaaagagaattttagactaatatccttgataaacattgatgcaaaaatcctcaataaaatactggcaaaccgaatccagcagcacatcaaaaagtttatccatcatgatcaagtgggcttcatccctgggatgcaaggctggttcaatatatgcaaatcaataagtgtaatccagcatataaacagaaccaaagacaaaaaccacatgattatctcaatagatgcagaaaaggcctttgacaaaattcaacaacccttcatgctaaaaactctcaataaattaggtattgatgggacatattttaaaataataagagctatctatgaaaaacccacagccaatatcatactgaatgggcaaaaactggaagcattccttttgaaaactggcacaagacagggatgccctctctcaccactcctattcaacatagtgttggaagttctggccagggcaattaggcaggagaaggaaataaagggtattcagttaggaaaagaggaagtcaaattgtccctgtttgcagatgacatgattgtatatctagaaaaccccattgtctcagcccaaaatctccttaagctgataagcaacttcagcaaagtctcaggatacaaaatcaatgtgcaaaaatcacaagcattcttatacaccaacaacagacaaacagagagccaaatcatgagtgaactcccattcacaattgcttcaaaaagaataaaatacctaggaatccaacttacaagggatgtgaaggacctcttcaaggagaactacaaaccactgctcaaggaaataaaagaggatacaaacaaatggaagaacattccatgctcatgggtaggaagaatcaatatcgtgaaaatggccatagtgtccaaggtaatttatagattcaatgccatccccatcaagctaccaatgactttcttcacagaattggaaaaaactactttaaagttcatatggaaccaaaaaagagcccacatcgccaagtcaatcctaagccaaaagaacaaagctggaggcatcacactacctgacttcaaactatactacaaggctacagtaaccaaaacagcatggtactggtaccaaaacagagatatagatcaatggaacagaacagagccctcagaaataacgccgcatatctacaactatctgatctttgacaaacctgagaaaaacaagcaatggggaaaggattccctatttaatcaatggtgctgggaaaactggctagccatatgtagaaagctgaaactggatcccttccttacaccttatacaaaaattaattcaagatggattaaagacttaaatgttagacctaaaaccataaaaaccctagaagaaaacctaggtattaccattcaggacataggcatggtcaaggacttcatgtctaaaacaccaaaagcaatggcaacaaaagacaaaattgacaaatgagatctaattaaactaaagagcttctgcacagcaaaagaaactaccatcagagtgaacaggcaacctacaaaatgggagaaaattttcgcaacctactcatctgacaaagggctaatatccagaatctacaatgaactcaaacaaatttacaagaaaaaaacaaacaaccccatcaaaaagtgggtgaaggacatgaacagacacttctcaaaagaagacgtttatgcagccaaaaaacaaatgaaaaaatgctcaccatcactggccaacagagaaatgcaaatcaaaaccacaatgagatatcatctcacaccagttagaatggcaatcattaaaaagtcaggaaacaacaggtgctggagaggatgtggagaaataggaacacttttacgctgttggtgggactgtaaactagttcaaccattgtggaagtcagtgtggcgattcctcagggatctagaactagaaataccatttgacccagccatcccattactgggtatatacccaaaggactataaatcatgctgctataaagacacatgcacacgtatgtttattgcagcactattcacaatagcaaagacttggaaccaacccaaatgtccaacaatgatagactggattaagaaaatgtggcacatatacaccttggaatactatgcagccataaaaaatgatgagttcttgtcctctgtgggacatggatgaaactggaaatcatcattctcagtaaactatcacaagaacaaaaaaccaaacaccacatgttctcactcatgggtgggatttgaacaatgagaacacatggacacaggaaggggaacatcacactctggggactgttgtgaggtggggggaggggggagggatagcattgggagatatacctaatgctaaatgacgagttagtgggtgcagcgcaccagcatggcacatgtatacatatgtaactaaccggcacattatgcacatgtaccctaaaacttaaagtataataaaaaaaaaaagtggggaaccagcttaatgccagtgcccactgctgcttacaggttgggttacttatagatatgggtggaaggggtctgggcagtatggcttgctgccctggagaacgttgataatgtgttcccaggatgaggtggttctggctcttgttctgggagaatatggtgttccttgcacttgctcccagcagaatatgaggcaggctgtttctcatggctccaacccccgtggaatgttttactttcaccaaggtctgcgaaatggcgggggacttacaaaatggtgcagtttggactaacattctgtattgatattcccccatttcattcctgatattggtagtttatatgctattttccttcgttgtaaatctcccaagagatttgccagtcttgtgggtcttttttcaaataactggctgtttgttctattgattttcctatttttctgtttccagttttattgatttttgctgtttatttccttcttttctgcttgttttgggtttattctgctctactttttctatgatcttaaagggggagcatagcaactcttctttttttttttttttttttttttttgacagagcctcactctgttacccaggctggagtgcagtggtgagatctcgactcactgcaacctccgcctcccaggttcaagccattctcctgcctcagcctcccgagtagctgggactacaggcatgtgcaaccatgcctggctaatttttttgtatttttattggagacagggtttcaccacgttggtcaggctggtctcaaactcctgacttcaagtgatttgcccgccttggcctcccaaagtgctgggattacaggcgtgagccaccatgcccggcctcttcctttctaattatattagtttcctattgctgctgtaacaaattaccacaaagttagcagcttaaaacaacatgaatttatcatacagttctgaaagtcagaaatccaaaatcagtttccctgagctgaaatcaaggtgtcggctggcttgtattccttctggagctgtaggggaaaatccatttccttgctttttccagcttctagaggctgactgcgtgccttggtttgtagccccttcctccatcttcaaagccagcagtgcacagcaccttctcttggctctatcctgtgcttccatccttatatattttctctttctgtggctgattctcctgagtccttcttataaggacccttgtgataatattggatccacctggataatccaagataatctcatcacaaaagtgttaatttagtcacatccagaaagtcccttttactatgttaaggcaacacattcacaggtactagagattaggatatttacatcgttacgggggctataattcagcctaccacactaatgtgtgcatttagtgcttaaatttcactttcatcactgaatctccttactgtcactacctatgtctcacaaattttgatatactgtatttccattttcactcacttaaatacatttttaaaatttcccatgagacttcctctttgatctatggattatttagaagtgtgtttttagtttttaagtgtttggagagtttcctgttatctttctgttattgatttgtagtttgattccatttaggccatagaacaccctttgagtttaattttaatctttaaaactttaatctttaaaatttatttaggtttcttttatggctcaggttatggtctatcttggtatatgttccatggcatttgaaaagaatgtatattctgttgccattaggtagagatttctgtatatgtcagttagatcgtgttgactgctgttgactggtggtgttacgttcttctatatccttgtatattttccttttttttttttttgtagagacaggttctcactctgtcacacaggctggagagcagtggcataatcatagctcactgcaacctcatcctcttgggctcaagtgatcctcctgcttcagccttccaagtagccaggactgcaggtgcacaccatcttccccagctaattttgttgttgttgtagagatggggtcttgctatgttacccaggctcctgttgcagatttttttgtctacttgttctagcaggtattgatagaagggtgttaaagtgtccagctataattgtagagtctatttctcatttcagttctaacactttttgtgtcacatatttcgcaggtctgttgtttgaaacacatacacatacaatcactatatcttcttgatggactgatgttcatcattatataatgtccctgtctgtctctggcaattttactaaaagtaaaatcttacttaaagtaatatcagatattactttatctgatattagtgtagccactcctgctttcctttgcttgcataattctttttccatccatttactttcaatttccatacatttgaagtgagtttctttagacagcatgtagttgggtcgtgtttttaaatatactctaccaatttgttttttaattggtgtatttagaccatttacacttcctgtaattatttatatgtttgggcttaagtatccccttttattttttgatttatatttcttctgtctgtttttctttactttttcctgtcttcctgtgggttgtatgaatattatttagaattccattatgatgtatctattatgtttttagtgtatctgtttgtatagtttttatagtggttgctctagatattgcattatatatacataatttttcacggtgtactggtgtcatcattttaccagtcctagtaggatatagaaatcttacctccagttatgtctctttaatcattttcacttgtttataataatatattaagtatttcctctataaacatgtagaatcacatcagacagtgttgtaatttttgtttcaactgtcaaatgtaatttagaagacttaagcagagaaggaaagcctactgttttttgtacttactgtgttctttttccttcctgatgttccatgactccttctttttgcattttttttctctttagctaacttcttttagctgttctattagggtaggtcctctggtgatgaattctcttatttttccttcatgtgagaatgtcttgatctccctttcatttctgaagaatatattctctgtgcatagaattccaggttgagagtccttatctttcagcatttgaaaaatattgtaccacttccttttggtctccaactgttattcattattatttattcataaatgcccatctgtacctattttaaatacatctacatagtaaaatatagttatgtaaaacttctgagtttactaagtcagatctaattttttacttgtagcatcaataaaatttacttctgtaccaataacaattacatacaagggtcaacaatttagctccctaaaattaagcatccctgaaattcaatggaaaggattctctaataacatggtcacatttttaaacctatttggagcaacagttggaaatatgtgatgaataagctgaataaattatacagaagtgttctatctaatttattaactgagaggccaaggcagaaggatctctcgaggccaggagttcagaaccagcctaaacaacatagtcagacccccatctccgcaaaaattaaatggaattaaaattttaaattagctgagtgtggggctgaggttctagttacttgggagactgaggcaggaggaacactcgagcccagaagttcaagccagcagtgagccatgattataccactgcactccaaactggttgagagaaggagaccctgtctctttaaaataaataaataaataaattgtagcaggacaagccacagacaaaacccctcagacaccgagttaaagaagaaagggctttattcagccaggagcttcagcaagactcatgtctccaaaaaccgagctccccgagtgagcaattcctgtccctttaagggctcacaactctaagggggtccgcatgagagggtcgtgatcgatggagcaaacagggggtacgtgactcggggctgcctgcaccggtaattagaatggaacaggacaggacagggattttcatggtacttttctatacaatgtctgtaatctatagataacataaccgattaggtcatgggtcaatctttaactaccaggcccaggatgtggggccaggctgtctgcttgtggatttcatttctgccttttagattttacttctttctttggaggcagaaattgggcataagacagtatgaggggttgtctcctcccttaaaatcacgaactggtggtatagtgaggagctattccttccaaaatcttttaaaaacattactggtcatggctgagaaaagtgtctctggagtcttaaagttagtgaaaataatttttcccaatataattatcttactccacatacgaagtcttgtaatccaacctgtagagagttgccatgcactgtgacttactttgtataatatagttctcaaccctttgtactcatatgcatgagaaactctcagtatctctcattacacacagtgatttcaacataccataaatgggctgattaaaagtgaggtcactttatgtacaaggaaatactattctctgagttacatggctcagataactcacaaaaccatctacaccacatcaaagtgcatttggggtacacaagtaaagcctctactatcagctacaaattcatagagcctggaacttccaggaaaatcaagcaaatataaagaatctgaatttagaagtcaactaatacaataaaaaagtaatttttaaaagcctgattaaattttcagttaaaatattcacataatactacacactttgagaacttttagtaattaaaagaatggcttttaaaacttacttaaaactgtttaatgagaacaggtggctagagaagcattttataccacagatgattaaatggactcaccttgtaaaggggtcatgaaaaaataagttaaaaacaagtaaagtgcgttaacagatcagtaaaataatttggaaaactatacatacttcaagaaaacgttaatacatttccaaaaacactaaatgttaagctttttgtcttgaaaaatacacaaaaatgttttatttaaaagataaaagtagaaattactctttaaaaatcaacaaagtaaaattttgagatacaaaatggtatattaggggtggggggagttttctttttaaaaaataataatgactaaaggaaactcatgaagtttaatatcaatgtgaaaaattactataaaatgatttttagccccacttgttaagaaactatattatatagtattatgtgctatttcttttctagagcaccaaataatcatctgatattaggtgttttacactgtaaatgagctaatttgtttatttatttatggagataggtctcactctgtaatccaggctggagtgcagtggaataaacacagctccttgcagcctcgacctcctgggcccaagcaatcctcctgcctcagcctcccaagcagctgagaccacaggtgcacaccaccatgtctggctaattattaaaaaaaaaaattgcgtggagttggggtctcaccgtgttgcccaggctggtctcaaactcctgggctcaagcaattctcacatctcagcctcccaaagtgctgggattacaggtgtgagctactgggcccagccctaatttgtttttaaatccaaaaataaatcaacaacagaagatagcactctaacttttactattttaaaatattttctgcatagcttccccaaatattagcattctaattgtgaccagcattatggtttttaatgagcctaatccaagtaaacaataaacaaatgcgcatgaaaactgtgagaaataaccattggtgtatgcttatgttccataaatagttatcaagtttacctttaaattgcatgtttagtttttccttacaacttaacactagatacaggaaactgtagaagtcataaacaaagactaaacaaaatcctctcgtcttgctaagatgtgtacatgattgcagtagacttatgctgaatataaatatatgttacatacatgtctcttattctatacaaaatctcagccaatattttcccacagaggagaggaatttgttctctcaaattgaaagtttttgccctttaaaaaggttattttaaatagccctaaagaaatatgttctgaaaataacagttgtatcatattccacttactattttccggttgaaaacttcaataaaataagtttaccatagtcaataagcctgttcaatgaacactgaaaaataaaaatttatccccagagtgattgcaaatgaaaatgtgtgctatttcaaaattacatgtacctctttaaaaatcagggcaattaatagaacacttaaatcgtattagctaaattcaaatttagcccctaacaataaagttttcttattcctttatagtgttttacaaaataatgaattaattatcataattttcttttgctacttacttcaaactataaagttaggactgcaaattgatgtaggtatcttatattattggtctacacctacttatttataaacattaatggaaacaatactgttccaatctaccacaaggatttccttctattttacaagcaagaacttctaacccagctcaacaacaaatcacactttaaatttgggtttgaaaacatgtattattagaggcacatgtttaaaaacaagtacagtatgaaatcttccttttcagtgagccagtgaattttcattcgtttgtttgtttctatgaatatttggtttacttccttcttctgggcaagattagtatgcaattctcattagcaagtcaaaaacctacagacctaaactatatgaaaacttaagttggtattgttagatgaagacaggtaagctaacaccaaaagaacaactgtactaaattttaacactattctttaatagttccattttcctgagtttgtgtttgttctttggcattggtttaggatataatccattttttcagaaggcgttgcttgctggggccaatttgggcaccatgctaaatctggaaagagcataaagcttcaagagggcgaagcaaagtctcttgtatgtaattatttttctccaagatggaaagagcaacaggtgcacactccagtgtagaaagacatctattaattggctgtatccgaattacatactgactagaaatgctcgtttttaactgcacctgtttgggggtgtcagaacaaggaattcttacagaaaatgtccttagcctggctccgtgtaccatcaatgacgatgattgtagaaggataaacaggagaatctaatataaattcttccagattagcagcttcttatattagcccctggatataacattaatgtaccaaacttccggcaaacagttgaaagttcaggatctctttcttcactgaagcgacgaccagtcttcactttgcgcttgtcctgggggaggcatgctgctggtagaggaactgtccgcaacattttgtcttcctctgctggatgctgaattatgcacaagtaggtagagatatgcaaagggtgcgctgggagaaatggacaaaaacacactttctgaggccggcttgcagcggctgcacgcaggcctcagctcctcggctccacctgcagctcccacagcccgcccgcactagcgtcgtccgcctctgttcccagggcagccgtcgccagcactgcgccgccctcccgctgctccttgtagtttggcgtctgagaccttgaggccccaggcggtcgcgcgacggggtcgcgcctctttctgcgactccatggcggacactctggtcaggccttcgatataatatttcaatatagacttaaggaatagattgtatgtgtacatatagatatggatataacataagtaactaaattaaaacaaatgtccataatttggcccaattagaaatccagaatgtatataccaaagaatttatattacaaaaagataaaaggacattgattagattttttgtctctacaacataaggtctaaattaactttagcatttgctaaaatataccagctgacatacttcatggactcaatcaatactggggctccaattatacttggagtgggccgtggtggcttacacctgtaatccaagcactttgggaagccgaggcgagtggatcacctgaggtcaggagttcaaaaccagcctggccaacatggtgaaaccctgtctctactaaaaatacaaaaattagccaggcatggtggcaggtgcctgtaatcccagctactcgggaggctgagtcaggagaatcacttgaacccgggaagcggaggttgccgtgagccaagatagcatcattgcactccagcccgggcaacaagagcgaaactccttctcaaaaaaatacatattatacttggggttctcattaaatttaaatattgtatgccctctaatcttaaaaaggtaactaaagttaaaaaatattttggataactatccctcactttactgctttggttgaatttcccatagttttgtacccattgctttaaagtatctcttattggacacagactctctgacacaacaaataataaactaaagttaaaattttggcacttaaaaaatggcttgataaaatgggaccctataaatccctctttaaaatagttaatatggcacaatttaagttagaataggcccttcaaggattaagacttgttatatagaacctcattatgaaaggggataattatccccactgcttctcattaaacagctcaattttgcctattcgagccctttgggaggccaagatgggaggactgcttaaccccaggagttgagaccggcctgagcaacgtagtgataccctatctctacaaaaattttaaaaattagccaggtgagttggtggtgtctgtagtcctagctactcaggaggcttaggtgagagaatcttttgagcccatgtgttcagtgatgcagtaagctatgatcacaccactgcaatccagcccagccaacagagcaagaccttgtccctaaaaaaaaaaataaaataataaaaagtaatggagattattgccttctcctggaggtagttgtttcctattagtcaactccttgacccactcgctccccagtgccctcccctaccactccctgaagcttccccccgccgacctcttgtcttacatctctgaccatgaccaccccttccccttggttatacacacatacacgaatgtacacatacattattaatgtatcagccacactgttcaacaatatgactgccagacctgccactttgatatatatataattcagacttttaatccactttacaactccaccaagattatactaaagaccccccaaaatttcagatctactttcttgactaatgatgcacacatgaaaaacttactgatgggccagattgcaaggactcctcgtatatccacttgtgttcttccttcttactctcatagtaaacattttctaggctgtttaggtgagcttatgcctcactctctaaatacgtccactattactaccccaggtttcttgcaatgatgccaaataggcacggggccaatgactcttattgtgttttcttatattctgtatttgtctatttggcatccaggcacctggaggcttcatcaaagttcacattttcttttgctgatgtttcaatttatcctacaaaactatgttccatgtagatctggcccatcttgaggctgctgtttctgcattcatcctcccatggtcacatttcttggccaacagaaccacagaaactggtctgccatgagttaacgtttagtccaaatcatttttccactttggctctgcttcaaatggggctgggctggtgatactgaagacaatcaatgcacctatgaattccagacaatgggctcttgtcattttcccaatctttcctcatcgcaatgttccacagctgcagttgtgccaaggcctctgagtcccagtggagctccttcagtgcacagttcacacaatggtgaactggcttggagatgccaagaggagttctggtgcacacagtgtgtgatgatgatggccttgcctgtgcccaggtcacccataccggcagctggtacaggctgacacactgtgctggccacagttcagggctggagagagactccaggagtgcaagtatgctctcgttttaggttcttcattttgattcatctcttcattggctggatttcattgtaacatagttttcaagaaggtagaagagaactacgttccgttccctatatcctttgataagaatgtctgcctatttcctttatagtcaaacatcatctcgtttggcaaaatatgtgttagtaaaacttttctcagaatactgaatgcattgatcgacttcctctggcattggacacagtggtggagaaggctgaggccctgatgggtaatttaggctctattctctgttccaagatcccactgaaggtcttaggcatgaattcagaacacccagccaagggtgtatcccactctgctgagcttcatcttggtcccttagctcatcttagatgagtgggaaatgccagaccctggtgctccttcctcttgttgatgaaaactctcgttgtctaaaagagtttctacttataccttggctgctttccttcaaatcttagttagagaggattttccatattttgtcatctcacgcttctttattcagaactgcttgtagaaaaataaagtaaccattcttgtgagttctttaaaggtgctagctgaccagttaggaaatccacaacccttccaagtaaatagtgtgaaagtagctcaagaagatccagagaattcctggagttttgttttgagaaaatgagttttgccttcttattcattcccactgtggaaattctgagtttcatcaaggataatcttttgtaagttataattgttttctaggtatatgctgggagattttcactgttgtcattaagaataaaagtgttgcaattttcccagttcaagcatggaagaaaatttattcaggaactacagacagagtaaataatactgtgcacagacgagttaacaaattaattttcctaatatccctcaaacaatatctgtgaagattatttagggagaagtgaaaatagacaaaacccaattatccaacatcacattaagttgcttaacttgcaaagttttcaaagaaatattttcacagaattagagaatgttatcaaatatataatgaaaaatatctcagtagcccagtccattttccatcaggtgagccttcgacaagatttaaacatctttttatcattcttctgaaagcaatctataccgattatctggtatagattttctgcaaaggaaaactggtctctcagagacttgagtctctttaaggctttaaaaagggctttcagcaagtatttccttcttgtaaaatagtaggattcagggtaaattacttgcgaccttaaatcatactggcagcttgtcatgccttcagggctcaagtagaagatctttgtcatgacacacacttttttagtgtaaccaccaatttttgccagcttctgctttaaggttagggcagtttgtgtagaatagcctttaaactcctcatcctgtaccatgtggaaggtgtataggactggaggactgtcctgggaaatcagaagagcatcacagaggactttgtggttctcttgcaagcccagatccacagaccagctcctagagaagatcagtgagccctttctgacagagtccatttcttcacatattaattgcttaagtccttcatgttgtaagaacagttttctgcaaaggttttctggagtatacgttatccttcctgatagccctgaataaggaaataataataataaattataaaacactaggaagttcccatttaagccatggcaaagtagcttgtaaaaaaccaatcttcccatcaaaaacactgtaaaagttgtataaaatatattcaaacaataatttaaagaactagaaagcaccaataaaagcagtatttgaagtgccacagtctttgatagaggtgaaacacagaaagtagcttcacattcacccctgctttttccctaagtagattttctatatcatggcatgggtaaatagaacccaaggagaaatcatcagtcttattaggctgaggaaaagaagtaagaagagctggaatatgagaagtaaaatctcagagaaaatgaagctgcagagaagaagccaaagtctacatacaaatttccctcaactcattggctaatacaggtcagatgctggaaacacagaagaaaatatcaactgggagactaaagagctgaatgtaagtttcttcagcctcatggtgctcaggaaacacagactggaattccagtcccaaaagagtggagggatcttggtaaacaccagcgacattacagcaatagaaaagccatgacctagtagtaacggcaaaattaaaaactattatacctagaaaaggataaaaaaacttcaaaagaataaaagcaatgggtggtactctaactacctgtcagaagtaaatatagccctttttggagaaatgtaatatctatcaaagtctctacaatttgtaatccatgatacaataaaaaattacgagacagaataaaaatcagaatgaattactagaaaacaggagaaaaatcagatcagagaaaaagactgacaagtgcttcagatattgtagttatcaaagagggactttaactgtaatatatttaaaaacaaaaaataataataaaatagatgaaaagatgaagatgtccttattctcttacagccttagaaaaactaaaattgagggataaaaattgtgtgggcattccttaactgaaaaatacagtaggtggtaataagaacttatttgataatatttaacagcagacagagcatagcagaaaacaggactagtcaataggaagacaggatggtagcaaaagtccgaactcaaactcaataaaaaaaaaaaaggtaaaaacagaagataagagatatatccgaaactgtcaaaaggtctagcaaatttataagtcccacaaagagaaaggagagaaaaataagataagcaatatttgaagagataaacaattatagttttttcaaagttgattaaagatatcactcacaaatacaagagtataccaatccttctcagactcttccaaaaaaattgaagaggaggaaatacttccaaactcatttcatgaggtcaacattaccctgatcatgaagtcagtcaaggacactacaaaaaaaaagaaagttacaggccaatatcactgttgaaactagatgcaaaaattctcaacaaaatgctagcaaaccaaattcaacagcacattaaaaggatcattcggcccagtgtagtggctcacgcctgtaatcccagcactttgggaggccaaggcaggtggatcacctgaggtcaggggtgcaagaccaacctggccaacatggtgacaccccgtctctactaaaaatacagaaaattagccagaaatggtggcaggcacctgtaatcccagctactcgggaggctgaagtaagagaatcgcttgaacccgggaggtggaggttgcagggtgccaagatagcgccattgcactccaacctgggtaacaagagtgaaaccatgtctcaaaaaaaaaaaaaaagaaaaaaaaagatcattcatcataataagtgggatttatccttgggatgcaagcatagtataacatgtgaaaatcaataattgtgatataccacattaataaaatgaagggcaaaactatatgctcatattaacggatacagaaaaagcattttacaaaattcaacattctgtaatttaaaaaaacctcttaaccaactaggtatagaaggaatgtacctcaccacagcaaagaccatatataaaaaacctagagctaactccatgctcaatggtgaaacattgaaagcttttcatctaagatcaggaacaaaacaaggatgcccatttcaccacttctatccaatatggaagtcctagccagagcaattagggaagaaaaaagaaataaaaagaatccaaactggaaaataagaaattaaattgtcacggtttgcccacaatgtgaacttatatatagaaaaccttaaagatgccaccaaaaaatgatcagaacaaataaaagaattcagtaaattttcagaatacaaaaatcagtagcatttccatacactaacaacaaattatcctataaagaaatcaagaaaacactcccatttacaatagctacaaaaaatacttgataataaatgttatcaaggagatgaaagatttctatactgatatctataaaatgctgatgaaggaaattggaaaagacacaaataaatggaaagatagcttgtgttcatggattgaaaaaatcatatttttaaaatgtccacactacccaaagtgatctacagattcaacgaaaaccctatcaaaattcccatgtcatttttcacagaaaaatgactgtatacctagaaaaccctaaagactcatccaaaaagcttctagatttgataaatgaattccattaagtttcaggatacaaaaccaatgtacacaaattagtactgctatacagcaagagtgaccaagctgagaatcaaatcaaaacctcaatccctccgacaacagctgcaaaataaaataaaatacttagcaatatacctagacaaggaggtgaaagatctctacaaggaaaaccacaaaacactgctgaaagaaatcatagatgaaacaaacaaatggaaacacatcccatgttcatggataggtagaatcaatattgtgaaaatgaccatactgacaaaagcaatctacatcaatgcaattcccatcaaaataccatcatcattcttcgcagaactagaaaaaataaccctaaaatttatatggcaccaaaaaagagtccacatagcaaaagcaagactaagcaaaaagaacaaatctggaggcatcacattacctgacttcaaattatgctacaaagctatagttaccaaaacagcatggttctgatataaaaataggcatgtagaccagtggaatagaatagagaacactgaaagaaagtctaatgcttacagttcaattggatcttcaacaaaacaagcaaaaacaaagtggggaaaggacaccccatgcaacaaatggtgctgggataatcggcaagccacatgtagaagaataaaaccagatcctcatctctcaccttatacaaaaaccaacccaacaggaatcaaagacttaaatctaagacctgaaaccataaaaattctacaagataacatcagaaaaacaattctagacgttggcttaggcaaagagttcataaccaagaacccaaaagcaaatgtaacaaaaacaaaaataaatagatgagaagtaactaaactaaaaggcttctgcacagcaaaagaaatagcagagtaaaaagacaatccacagagtgggagaaaatatttgcaacctatgcatctgacaaatgactgatatccagaatctatgaggaactcaaacaaatcagcaagaaaaaaacaaagaatcccatcaaaaagtgggcaaaggatataaatagacaattctcaaaagaagatatacaaatggccaatgaacatgaaaatatgctcaacatcactaatgatcatggaaatgaaaattaagtccacaatgagaccatcttacacctgcaagaatggccataattaaaagtcaaaaaataatagatgttggcaagtatgcactgaaaagggaattcttttatactgctggtgtgaatgtaaactattacaaccactgtggaaaaatgtgtggagattcattagggaattaaaagtagaactaccatttgctccagcaatcccactactgggtatctactgagaggaaaataagtcattacatgagaaagatgtttgcacacacatttatagcagtacaatttgcaattccaaaaatatggaaccagcctaaatgcccatcagccatcaagtggataaagaaaatgtggtatatatacaccatggaatgctatcagtcataaaaaggaatgaaataatggcattcacagcaacctgaatggggtgggaaccattattctaactgaagtaactcaggaatggaaaaccaaatattgtatgttctcactcataagtgggagctaggccatgaggacacaaagactaagaatgatacaaaggactttggggactcaaggggaagggtggaaggggaatgagggatagaagactacacactgggtacagtgtacattgctcaggtgatagctgcaccaaaatctcagaagtcaccactaaagaacttattcatgtaaccataaaccacttgttccccaaaaactagtgaaataaaaattttaaaaattaacatataagatacctagaaaaagcatacattttaaaagtacttactacacaaagtaaataaatttttgaaaccaatctgctttgttctcacaagaaaataaaaatagcctgaaataaggatctgaaatataagtcagactaatactgagatgccagctattgaatttaggattccttaaaaatatcttaccaaaattaacaccgaaggaaacagaaagagtaggcaacccttttattaaaaaaccagaaatatgtcaggcacagtggctcaagcctgtaatcctagagccctgataggctgaggcagttggatcacttgagcccaagagcttgaagctgcagtgagccatgatcacaccgctacacttcagcctgggtgacagagccagttcctgattgaaaaaagaactaacagtcttcccacaaaaggaagacaaaccattttacaggcaaattccaccacaatttcaagcatatcattctaatcttatataaattttttcaaaggataggaaaagaggaaataatccccaactcattctgagttcagcacaattttaatacaaatactagacaaagaaagagagaaaactattcttagaccttgtcactcatggatttagatacagaaattctaaattaagtattagcagctgaataaaaatgcataaaaaagataatactgcaagaccgaactgagtttgttccaggaatgcaaaaaaggcttaatagaaaatattaaacatcatttgccaatcaacatattaaaaacatttaatcatgtcaacaggagtagaaaatgtgtttgataaaattcagtattcatccatgataaaaaaagaaaaaacatttagtaaactagaaatatcattaaacttccttagcctgataatggtatattcaaagtacctaaggcaaacctcaatttcttttttttattattatactttaagttctggggtacatgtgcacaatgcacaggtttgttacataggtatacatgtgccatgttgggcaaacctcaatttaaatgggaaagccatagacacactctctttaaaatctgaactaagactatttgcattaagaattgtctaaaagttttcttcagttcattaggacaagaaaaaaagacattaaaggcagaaagattggaaaggaaaagacaaaacattttatgatctgcatatttgtttatacaaaatgtaaataatctatggacagattatttaaaataataaggaaacctaacaatgtggccttatataaactcagtatgtaaaaatcaactgcatttctacacattagcaataaacaagaaaatggaacttttaaaaaaaatatctttacaacaacaaaaataaaaggaacctagacataagtgtaataaaagatgtacaaaatgtgtacacagaaatttatgaaactataaaggcattaaagaagatataaataagtaaaaagatttcctatactcaaggatacaacttactgatataaatatgccatgtcttcccaaatctatctagagatgcactgtaactgcaaatcaaaatcccaaaagtttttttggcatttaagcagattctaaagtgtgtatagaagattaaatgattaaaaattgcctagacactctcaaagaaaaactaaagggcttaccctaccagatatcgatacttagtataacattacagtggcagggacagacaatttgatcaaggaaacataatagagattctagaaagaggattatctatagatatacagttgacccttgaacaacatgggtttgaattgcatgggtccacttacgccaagatcttcttccacctctgccaccccaagatagcaagaccaacccttctcttcctcagcctacacaacgtgaaggcaatgagtacgaagacctctaaatgatccatttacacctaatttatagaaaatatatttcctcttccttatgactttctcaataacattttcttttctctagcttactttattgtaagaatatagtatatgatacttattgtaagaatatagtatatgatacacacaaaatatgtgttaattgactacgttattggtaaggctttgggtcaaaagtaagctattagtagttaactttttggaaagtcaaaagttatacaccgattttcgactgcaccttttgttcaaaggtgaattgtacttagtaatatgatgaaggtggcatggcagatcatggtgaaagtgagacttttcagtattgcggctgggaaagttgttatccacatggaataaaatgaaatagcatgctacattactgtctattgagatggattgtgtatttatttatttgtttgtttgtttgtttgttacttactgagacaaggtctcacgctgttgcctgggctggagtacagtggtgtgatctcagcccactgcaagctccgcctcctggattcaaatgattcttgtgcctcagtctcctgagtagctgggtctgcaggtgtgcaccaccacacctggctaatttttgtattttagtagagacacggcttcaccatgttggccaggctgttctcttggcctcaagtgatccgcccacctctggattgtgtatttacatgttaaatgttgagtgcaaaactttaaaatttttaggagaaaattaaaagaaatatctttataatcctagtgtatagaaggatctcttatgcaaggcacaaagagcactaaaccgcaacattttaaatgatagttttgcctacattaaaatttaaaactactacttatgagagtataccttaagaaaagagaaaatgcaagccaccagcttggagaaaacatttggtagtcgttaatacctatgactaaaagaggattttattctagaatctctaaattactcctataaatcaataagaaaaagacaaagcttattagaaaaatggtcaaagacaaaatagacactgcacagaagatgaaatatatatggccagtaagtatatggagagatgctcaacccaatcaataaccagggaaatgcacatcacaaagacataccattttatacacatttgattgagaagaaggaggtcaagagaaggacaaccataaataagaaaaatttgacaactggagaagatgtggcatttctaatatattgctgatgggagtaacatgacctatctactttcaaaacaatttggcattatcttattacttgaatattcacacacctcctgagccaacaattctactcctacttaggcacccaggagaaaatcttgcacatatgcactagaagaccgactaagaatgttcaaggtaacactgttcatgtcacagaaagcaggaaataactcaattgcccatcatcaacaacaacaacaaaaacagatagatcaatcagagatcctgagtactgatggcgtttcttcagtaactgaacatagctatgcctgaaggtgggcctcaatctagactgctcagtgacatgatatatatgctttctttttttgtttgtttaaactaaactgacttgggttgctcttactttcaagtaaacgagtttgtattgcaccaagaaaattctaacccaaatataaagaaataggatttgacagattcaatgacttaaaacaccaaagaattctcataaacacaagaatgtgctttcagagcaaatttcaagactgagctggtttgaagagaaagaggtttgactacagtcacactaacaaatccgaagaagccagaatgaaattacctggacagtgatgtctctgccgttgccattccaaaagaggccaactgtggggagcaggtaatgacgtatttatttgagagatcacctcttcatatgaactggaaaattcttaaaaacaaaaatatcacattcttaatttcgcagaagggagaccccaactaactaatgcatagtattatatattaaaagtctacttgtaactgattctgttttccaaaaaaaaattaatgttagatattgtggttagattcttaggtcagatacaaattgcaaaattaacttttgatgccactgacacactatatttcaaatgaaaattaacagtaaaaatgcattaatagtaatttaatacattaccatataattgggtttatttttaaagcagttaaaatgagacgtgatggctagtgaaggaaagctgacttttgtgcagattctgaggaagaagcttacattttcagacattttataagctgctagtactggtccaattgctagtactggtccaatttcatttgaggctttcttttcccaaacgcagagaaaataccagcattattccttccttactagtacaaattagggctactacttggctcacaaatgtgagaagaaaaaggaagcggttttataggaaataaatagaaagggacgccaggcatggtggctcacgcctgtaatcccagcactttgggaggccgaggcgggtgaattgcctgaggtcaagagttcgagaccagcctggccaacatggtgaaactccgtctctactaaaaatacaaaaatttagctgggcgtggtggcgggcacctgtaatcccagctactcggaaggctgaggcaggagaatcgcttgaatccaggaggcggaggttgcagtaagccgagatcctgccattgcactccagcctgggtgacagagcaagactccgtctcaaaataaataaataaataaataaataaataaataaataaataaataaatagaaaggggacaagaagcatgaaggagcaagtaagtaaaagaggcaaatgttcctgaaagaaagcaatggttacttactgaaatagagctcagaaacaaaaaggaaaaggattaaacggggtttccttcaaaactagtatagacgtggtagggaagaaacttccaggtttaattgggtttttgcaccaggtagggctactaaaagtagatgatgtgcttattttatgaaatatctatcttcttctaagggtatagaagaaaacaagaggcagggaactttttttttttttttttttttttgagatggagtctcgctctgttgcccaggctggagtgcagtggcgcaatctccgcccactgcaacctccgccacctggcttcaaccgattctcctgcctcagcctcctgagtagctgggactacaggcacgtgccatcacacccagctaattttttgtatttttagtagagacggggtttcaccatcttagccagggatggtctctatctcctgacctcgtgatccgcccgccttggcctcccaaagtgctgggaatacagacgtgagccaccgcgcctggccgaggcagggaactattgattgtatccaccagggattaatagtttaggtgctgaaatttgaggactattgatcttgccccagatcccatagagaaaacctccctgccacccaagccaaatgcattcctgttgcgaatcccccgctctcaacttggttcagcctccaccatgaactggatccattccttcctggtcaactgcatcacacggttatctttcacatgccaggaatcaggctctttagcaaacactgcacagcagaagcgctccactctgagtgcacagacatatccacaaagacttcctttatcatatactccaaggaatttgcatgaataatttatcttcttcttctccatacagaagtgatgcacaggcatcttcctaatggacttttcgatttctctttctaagtcatcgaggtcactcatctctgctttaaagccaattatttctttatcttcatttaaaccaatgaacaaatatcctccatcagtatttgcaaatgcagaaacatattgagggagaatctctttaattcgttgtaacaacttttctgtcgagaagtttttaatttcaacatgtgtggattcagtaaaggtcaatttttctttccgatcaagttctgttctatcaaaaaaaaccccggccaaggccttcatgttattttcttcttgtatatcaacacagggcctctttgccagcaattctggtcttaaatacaatctccctctagtctttttcatgtctttgaggaactccagtgcagcagtggcattcatgacttttgcagatgttatatctcttttgtacaaattggagctcaaggtggtaatccgcagaccagaggtgttcaagctccatgacttcacaaaaatcagaaagtagttaccattctgcatgaagtctaagtactcaggaacaaataacagaatgttactaaaagaattttccaaatctagtcctattccatcttttgtataactatagtcttcattctcaatttcagccttgatcactccccctccagaattgagcagagcacacatagctcgtgagacactttcattctgcttttttctcagtttacaatccttcatttttttcctactgttctctccaagagtgactcttcccacatctagaaccaactcggcataattcgtttccaaatcaacactgatgttcattttcccagcagctatgcagtgtccaagcagaaattcttttctgtaaaatagacagagccattagaataggacctgaactagaaagatagcaaattctgtattatgaggcaaatgcaaaaaaatcctgtgctgtatatattctactagactggtaagtatatggatatgaagagactggcaaattttgagctaagaccgcaataatttatactcctactgaattttcaaatttgttactatagttctatataatgtattctaattatgtaatctctttatccgccttttttctcctttctagtccctaatattgtacaacctgttttctctctccttttcttaaacaacccctggagtgagtctatgtttttatcttctcagtgaaccaggctttagttatacatattatttctacttttctttttattttaataatttcagcttttaccttaattatctccatttatgggtataaatcttttggaagatttcccgttaaggtctaatgacatccaacatgtcatgttaattatttttccttcttataagaatgaaatagatttataaattttggccattgatcttaagcaaagtgggctaagtcattgtgccctttttaaatctaatatccacatattttcaataaggaaaattcttatatacaaaacacctgtgctatggtttgaatgtttgtgttcccccaaaattcatatgttgaaattataactcctgaggtgatgaggtttttgggaagtgatcaggttatgagggtgaagccctcatgaatgagattagtactctcctaaaagggaccccggaacactagctcatcccttccactatgtgagaacacagcaataagtaggcagtctgcgacaggaaaagggccctcaccagaatccaacagtgctggcaccttaatcttaaacttcccagcctccagaactgtgagtcataaatttctgttatttgtaagccacccagcttgcggtattttgttatggcggcctaaacaaactaagacattgtgctttagtctatgtatccctaatccattagctctgttcccttaaaatctattaggatcactgctttgctctaaatggaaacttttaagttaagaagtgtaacttaagtttaacttttttttaagtgtaacttaagtgtaactttttaagttaagaagtgtgacttaagtttaactatttttaaatgtaacaagtgtaacttttaagttaagaagtgtgacttaagtttaacttttttttaaagtgtaatttaagtgtaacttttaagttaagaagtgtgacaagtttaactttttaaaaaaagtgtaatttatgtgtaacttttaagttaagaagtatgacttaagtttaacttttttaaaagtggaatttaagtgtaacttttaagttaagaagtgtgacttaagtttaacttttaagtgtaacttaagtgtaacttttaagttaagttaataagtgtaacttaagaagtgtaggttttccgagtggcatagagacaattgagaataaagtccatcataggtagtaattgctatactagaaaaggaatgtaaagggggtcagaatattcctgtccacagctggaccaatatcatgcagatactcagctaaggttgtggataccacctgtgtccatataaattcctgatcacatgtaaacaatgttaacattagagccccaaaccatttggacagttggggttgaatcctttagttctttgtccatgttttctcttagctctttgaagatacttaagacagtgcctgttttttattttattaatttataaataaaatcctatatattgatcatgtacaatgtgtttttttgaaacttgtatatattgtggaatggctatgttgagccaactaccatatacattacttcacatacttatcattttttgtggtgaacattgctactattttagcaactttcaagaatacaggcccagcacagtggctcatgcctataatccaagcagtttgggagactgaagtgggaggatcacttgaagccaagagttcaagaccagcctagacaacaaaacaagaccacatctctacagaaaagtaaaataaaataagaattggcttggcacagtggtttgtgcctatggtctcagctacttaaaaggctgaggtgggaggatcacttgaatccaggagtccaaggctgcagtaagcgatgatcatggcactgcactctagcttgggcaacagagaaagaccctgtctccaaataaataaatacataataaagaatacaacatattgttaactatagtaatcatattgtacaatagagctcttgaacttattcctcctatctaactgacattttgtaacctttaaccaacatttccccaaaccccatcttcccccagtaaccactattctactctatacttctatgagtttaactttgatagattctacaaataagtgaaatcatgcagtatttgtctgtctctacttggcttatttcacttaacataaagtcctccagattcatccatgttatcaaaaatgacaggatttccttctttttcttaaggctaattagtattttattatctatatgtaccactttttctttatccattcatctgttggtgaacacttaggttgcttccatatcttgcctattgtgaataatgctgcaatagacatgagagtacagatatctctttgatagactgatttcattccctctggatatttatccaggagtgaggttgctgaatcatatggtggttctttttcttttcttttcttttcttttttttttttttttttttttttttcagaaacctccatactattttccataatggctaagctagtttaaattcctaccaatagtgtgcaatggttctcttttctctacaccatctctttttatctcttgtcttttttataatagccattttaacatgtgtgaggtgatttctcattgtggttttaatttgcattttcctgatgattagtaatgttgagcattatttcatatatctgttgtccattagaatgtcttctcttgagaaatgtctattcagatcctttgcccattttttaatctgtttttttttcttactattgagttgtttgggtttcttatatattttggatattaacctcttatcagatgtatggtttacaaatgttttctttcattctgtagcctattcttttactctgttgattttttcctttactgtgcagaagctttttggtttgatgtaatcccatttgtctacatttgctttcattgcctgtccgccattgggatgacatccaaaacatcactgcccaggccaatgtcttggatctttttcatatattttcttctagtagttttataatttcagctattacatctaagtctttaatccatgttgagttgatttttgtatttggtgtgagatgagggtctaacttcattttctgcatgtggatatcaagaacgttattttaaaatctttgtctaatatgtctgatgtctggccttcctcagagatgtgttctgccaatttactttcttcttttgaataggtcatatttttctgttgtgtgtatgctttatgaatttttgttggaaattggacatttgaaaaaacagcgatctctcacagtctttgcagacaaatgctatggcaaggcaaaccttcagtgatgggctaagtatactctgatcttagggatcagctcaaggaaaaagcttaaggtcttctcaggtcttttctgagcatttatcctgcctggattgagcggggctttcttgattcctctacatacatgcctgcttttgaatgtcttaatttcccaaagaatctcaccccagctcatcttctgagccttagatggttattctatgtctctagctataatctcttgcctaagacatctgggggtctatagtcttcttgcagctttcctgagcagtggctgtcacttctcctcacctgagatctgagttaggggatacagaaatgaatccttcaggcagtccccagacaggttacaacattgaaaataagttttactatgccccaccaattccagggaggaaactaggagcagtgatgctgcctcctcaagactaagaccttgccatgcagggcaaaaacttgggcaagggtgagtaaaaacaccatgaaatttcctacagttttgaatgctgcttttccttgattgggcattcatttagttgcaacagatctttgttgttagttcagccagttttgggttgcttttgatgtttccatggagaaacagagttgaagcttcctaatccactatttttctgacatcattcctgtcaccatttctttatattaaacgcaattcgataatatttttaagattttgcacccatgatgtccctttctcctattcttgttgacagacaatgcaatcaatagcttcacaaaatgagttgaggatgtgagctgtatttctattatttcacattttacccaacatgaggacctttttgcagtgggagagttggtcatggttggccatactgcccaaaacgaaaatatactatttgaatcttgcttttccatgtatcaatatagtatatacaacaagttttgcaaaaataataattagctattctttaaaaaccttattaactgcataatttcatacatggtattaatgtaccattatttaactattaccttacaactgaacattgaagttgctttcaatcattcgatataattatactagaatcttgactcagttatttcaatgtttgggtatgctaatcacacagtctaattttcattgagtctaagagtgccctggcaaagcacttcaattatatatacagatacggttcagatatatacaaagatggttaaatcgagtatgggaggccagaacatgtagacagaaaagaagccagatttcaggatataagaaatggaaccttgaaggggaaaaattatgtaagagaagaaagagtctgaatctgtggaaataaaggttcatggtgaaacataaggttatatttgaacctgtgccttaggtacataattaagctgaaattatgtaagtatatagagtgtatatatgtacacacagagagagacagaagtttgtaaaagttaaattactgtatcaagtgacaaaaacttcaaagattttgatatatattatcaaatactttcccaaataattgtatcagaattatcgctagcaaatttatcttagtggtgattacagcactttgccttgaaccttttggggggaagaggatatggtataaaagctactggaaagcatcttagtggggattacagaactttggcctgtaccttttgcggggaagaggatgtggtctaaaagctgttagaaagcatcttagtggggattacagaacttttcccctgtaatttttgggggtaagaggatgtggtctaaaagctattagaaagcagcatctttccctcagtgtttcctgaaaactcagagagaacaaagagaggctgccttctaagagatattggacctagcattcattcaaataggctccctgggcctgggtccatagaagaaagcatttgcatatgacccagggagattccaaaaaaagagaacctaagtggggaggacctgactcctggtagttgaacaagagtgaagccaggtaagcacaatcattgaagtttaaatttaaaactcaatagtagtctcaatgtggcataattatgctagaaagcagaggaagatgtatatctctgccatgctgagctttctccttagtattatagcacaattagtgttctttagacccaatttcttcatatttcttgcacatgaggctgccccaaaggcaagtccaccttccctgttgaccagacagaagagattctccatctctacccacaaaggctgcaggagaatcagttccacttctacccaggcgcacagccccagccctacaattttctggtaatgcctcaccaagcagcctctgctctgctccccgattcttttttgcagcctctctaactagagtcttgtcccctttcctcttagcccacctttctgcactgtctacatcaggctgggctctgtgtaaacttttttgcctaacccaccatacacagaaggggacagaaatcacatctcaccctcagattgattaaggagggtgctcataccactgagaaacttggaacccatgggagctgcagttgagccaccttatagaggacccagcgcttgtgaactagcctgggatcccggtcaccccagtccaacatctgcagctgtgtaaaactttccatagttgaaaatcactgccttcaagcatacatctgggacaaaacccttaaaaaatgagctggggattgagcttaccaaatccctagggcctaaaacttactggcctcccttaaaccttgggtctaggtttacaggttagatgtttccactgaaatcctttatacttttgactataggggaaattctatcagacctgaactcactatttaggctttgttgttggctatctttaatgggaaaggagacagcattcagatctccttagagttatgtcagaacagcaggttagtaggaactgcccacagggtgggacagaagttgtaagagctacctcctgggaaacaaaaatcatgcaacactctttgccctcctaggatgtcactttgcatttagttcaggacagcactgctctcatccttcccgccttctagataataaaccagcagggcatgagggtgcttggtttttcttttaggatctagcaatgcagttcatcagtgcctggtcgcatttcacctaaagaacctattccccaactccctgcatgttcaggactccaggaggatggataaccctgggaggtctggacacccaccaagcctggcctgaccatagagcactctgccctccctgcctctctagctctgcttgaacactgcagatccctggctcactggccccacagctctttaaattttctggtaatgctttaaattttctgggctgctccccagcccatgcaggagcaaaagttccacccgacctatagcttccaagtccaccattctgaagtcctcaacagcctgcagtttattagaagttgctacagagacaggaaagtgttaccggtggagggtgtcctgctcactgaaacattctgtttgcaggagaaaaacaaaaacttggtctgttctaggatctatgtgtttccttaaagtcttagaatgagcaactccattttggtttggtttggtctgttggggccatgagctcagtccaaaacactggcctttcacaattttgttttttaaaattccccctttttgttcaggttctcacttaggtgagaatgtaaccaaaacgtaaggccttagcgccgctctcagttaccatcattttgggtttccagtctcagcacaccatccataggttacagtgtcctcatggtcgcatatttgtttcacttctcatcattccagttgaagagagaccatttgacattctagagatggctgcatgcaaacatcgaaaacctttgagagaatacagtgcaccagggagcctattattatgatgactattgggaggataataccaagagtttggaggatgctccttgcccagggttcccataaaccaaaccagttaaaattaaatagatcaaataatgaactaaataaagaatctaccaacttaagtaaacaatctcctcattaatcccctacaactgaatctcttaatcttcatttaatgtatttctccatagactctaagtgccagcagctgcacagatacttctctgttcagccaattctatcataactttcacaaaagaatttaaagtctgttgtgtaactatggcctttacagtagatgttctgagaacatctatcctatgggttctaggttgtgaaggggttgattgttctcagtgaaccataaaaagctttctttacctggtgaaaatacactgtagcataatcatgggaaaagcttttatacaacaagaaaacatgcattgaaagtgacattgaataaaatccctttgtaaatgtttaaatggcccatcgggtagccaaatgtacctgaagctttgattgtcttcccaggaatatggatttgagaaaccaaacattggttataaacaactttagcaatttataagtcagcggtttccatggcagtttgatttttaaaggtcaaacttcctcgcacttcaaagaacgctgaggccaaacagcaccaaaggagaacatcacactttaacccgacacaaccctgcttagaacagcagcacaagagcctgcatacatgcaactccatcccactttaccattcaacagcaaactccagattccaaacaatattgaggccaaacactactgcaaccggaagagaaaattctaaggagggcttagtactaggcctaagaacctctaccaaaggaacccccttggagaggctgaggtccaaaggatcctccagagcatccccctttagggtccaatcttagagcgtcagacgtctctgaccttaggtggtcaccagtgccactttacatgttttccctccagaggggatggcctactgtgagctttccttttgtctctggatgaaggccttgacttctagcatccttataatttgataaggccatgctttcccatggttcccattccactagagtgatagtcatgaactttaatgatatgaaatggaggctaggtgggtttcttttaaccttagccagtagagtaggggaagggaagaatttaacataaggaaagaaggtttaagtcacctgaaacacgtgtgagttcgccctggagaagctgcgtcacacatagggatcagggaccacaaccagaaaagacagaaaagagcccttcccgcttctgggcagggcaactatccccattcactccttggccttcaaggcagcactggagagtagcccccggccagaaacctgcagtcgcctccgtgtctaggcgctacccaccaaggatcccacgttggaaaggaaaagagaaagagagagatttacctgtatggagcagaaaggaaaagggaaaggagaaaaataaatcccagactttgggcttacctcctggttggcttgccaaaatatgttaccagtgaagagtgtccaggttcttggcgtgttgaacaaagaactggacaaacacacaaacaaagcaaggaaagaatgaagcaacaaaagcagagatttattgaaaacgaaagtgcactccacagggtgggagcaggcccgaggatagcggctcaagagcccggtttcagaattttctggggtttaagtaccctctaaagttttcccactggttacttggtgtgcacacaatgtaaatgaaataggagcccgagatcagtctgaatggttgcagaaagcgatcaatgggaggctgaagtgaagttacaaagttatgccctatgaaaacatctgattggacgcagaaagcgaagttacaaagttacattcctatgcacatgaagacttggccctggagaccagtctgattggttgcgggaggggaccaatcagaggtattttcagtttttcatctgccatgtagaaaaggaggggctacaaaggaagtttgtggaaagttgggattttcctccagacccttattctcctgcttcagaagggagagaaagcagaccgggatgggggtgcggggatcttcccgggagtggtggggttgtgttaccagtgccccacctcctcccgagccagcagactccccagaaatgaaaaactaaggctggaaggtttagcgatggagcaggaccaacttaccagctcgcggtgctccctagaagctggattcttcgcaggtgcgagcacaccccagatgccagcgtggacccttgagcaactggaagttaaaaacccacgaaaacagctctgagtgatctctagggagctctcgtttctttttcacccatgtgtattttttaagacaaaaagaaaaaaggtaatttaaagaaaacaaagaacaaaggaacttggcgaggcccaggctacagtccgcgggctcactctccacagagtaaaaagaacgcgaatccttttctgttttccggccctccccatcctgggctgcggctccacacttccccagcgtggcctgcatttctattgggcagctggcgctccggaagtgtccgcactctttattatcgactctgcgcctttgggcaattgtcactattttggttcatcaaaattgaagaaataccaggcattcttaccatgcccctaaaggggtgactcaacctttccagctgtactcgcattcccagagcagcactgctgcccccttgcttaaaagcacggttgcccccaggaaccaggccagggcagctgtggatggacaggagaggacaaaggtgcaaggagcggattgctccaggacagacagattcaaatacctacccctggcagtgtagggagcatcttggggccatttgggagattcctttattgggatgctccaaaggctagtctggccggatacagtcctcctgccactttgctttcctttagcccccttattatgataattatggtaatacatgtttttcctgctaacttgtctaagaattggtgtctcagtacatagcttttgaaatgcacacaggccacgatgactcatcacaggggaatgtgcaagtctgagttgctccttctccgcaagctccacctaccccactctggactgcattaactgcctactgcctattctaaaatcttaaggtacctaggaagagtacctattcacattaaataacgtatatattgaaagcacatagctgcgcttttcttcttctcatctgatccagacgccagctctatggatacagtctcaccgaagttaaaaaactattcttcagtcattggcttagaaaatgctagtgccggctgggagcagtggctcatgcccataattccaggactttgggaggccgaggtgggtggatcacctgaagtcaagagttcgagaccagcccagccaacgtagtgaaacccccgtctccactaaaaatacaaaaaaaattagccgggcgtggtggcagacccctgtaatcccagctactagggaggcagaggcaggagaatcagttgaacctgggaagcggaggttgcagtgtgctgagatcatgccactgcactgcagcctgggcaacaagagcaaaactctgtctcggggaaaaaaaaggaaagaagaaagaaagaaagaaagagagagagagagaaaggaaggaaggaaggaaggaaggaaggaaggaaggaaggaagggaaagaaagaaagaaagaaagaaagaaagaggaaggaaggaaggaaaggaaggaaggaaggaaggaaggaaggaagggagagaagagagaaaggaagggagggagggagggaaagaaaaaaagaaagaagagagagagagagaaagaaaaagaaagaaagaaagagaaagaaacaaagaaaaaaagctagcgcaggccgggtgcggtggctcacgtctataatcccagcactttgggaggccgaagtgggtggattgcctgagctcaggagttggagaccagccagggcaatatggtgagagggcatagtcgtgcgcgccttggtagtcccaactactgtggtggactggggagggtgtgggggcgctgaggcatgagaatcgcttggatggaggcagaggttgcagtgagccaagatcacacggctgcactccatcctgaaagacagagcaagggattctatctcaaaaaaagaaaaagaaaaaaaagaaaagaaaagaaaaagaaaatgctagtgcagggattttcccagagcaccaggatggcttccaaggcagaaacaaaagacattaagaagttgttcccatgggaatgtgtgtggcaggcatgacatatcagatcaacttggaatagaaaatgcatatcccaaaaggcccctcaaaagtgagcagagtaaaaacattcacagaacttttaaattatgtttttattaactattgagtagaaacaatatttatagaatacatataaggtataaagaacaaaagtatgaacatctgtgaaccccttacacggctaaagaatattaacaataagcctctcctcagaggtaaaacaccatatcaaagtttacattgaaccttgtgttgctattctttatagtgttttgcggggagggggttggggggttgttctggttgtttttagcccactgcagccttcacctcctgggctccagtgatcctctcacctcagcctcccagtagctgggactacaggcacacaccaccaaacccagctaatttttaaattttatttcattttattttattttttgtagagccaggatcttgctatgttgccaaggcttgtctctaacccctgggctcaagtgattctcctgccttggcctctggaagtgctgagattacaggtgtgagccaccatgctggcttgctgtttgttcatgctgtaaattccctttgttgatttccaaaagtgtttttatacttctaagttgctgagagtccttattatgaatggatgttgaactttatcaaaagctttttcctctattcagatgatcatgtgatttttctcttttgaactcttaatctgtggtgaattacactgattaatttttttttcttggagacagggtctcaaactggcacccaggctagagtgcggtgatgcagtcacagctcagtgcagactcaaacttctggcctgaaggatctttcctccttcagcctccagaaagtctgggattacaggagtgagccacctcactgggcctgatgattgattttttaacgccaaaatcaacgttgaattcctgacttgaaccaccttggtcgtggtgtattatcacttttacaaattgttggattttgtttgctaaaattttgtttagaatttttcatgtagatatttgagtgataattgagtgacctgcaattttcctttcatactttacctatcagacttgttatcaagattatgccagcctcatgaaattagttaggaactgtttcctctttctaggaaagcatttgaataagactgaaattctctaggactgaaattctctcctccttaaacttgcttgttagaacctgctgtgacaatggttacagaatttctgctttgatccacgagttaaacacttttttaattccaaaagatatgaacatttttctagttaccgttttattactagtttataatgtatttgcatgtggggtcaaagaatgtgatcagtatcagttctctgaactctttgaataattactttttaattagaaaaaaatctcaaatattatgcgttcagaagcaaaaacaccccccctccacacacacacacacacacactttattaattacaaaaagcaaattgtaactgcacagtagggaaacctggcagacgccactttatccaaatgatcagagttaacatcatcaggaatggaactaatcactatcaagtgccttctaataccgtgaactgagaaccgtaacagcccttctatggaattcatgccaaaaatgcataacctgaatctaatcatgagaacacatgaaatgacccaaaatcagatactctgcaaaataataggccagtcctcttcaatagtgtcaaagatatgacaaagacagattaacatctccagattaaatgagacttaaaagaaaggaaagctcaatacaatgcatgatcttagatcaaatcctggaccagaactttttctcttttgagaaaaaaacataaagacacttgaggcacaactgatataattcaataaagtctacagattagataatagtatcagggttaatttactgattttgatgatggtactataaatgtccttttaggaaacacccactgaagtatttagtggtaaatgggaaccctgtccgctacttacttttgaatctcaggaagaaaaatggtagaaggaggcacagggacaaggcgagagaaggccatcaggatcatctgtggtcaaaggactctgggcacactgacatttaataactaattttaaacttttgattgttttattattattttgttagacatggggtcttattctgttgcccaggctaggattcagtgacacgattatcgctaactacagccttgaactcctggaatcaagcgatcctctcgcctcggcctctggaatagctaggactgcaggagcacaccaccacacccagataattttttgttgtcttctcgaggggggggtcatgctatgctgcccaggctggcctcatatgatcctcccacctcagcctcctgctaatatataatttaaatatttgtctttcactatgctcaaggctttactaagttttgttaaaagtagggccaggtgttgactgttaattcgtgaaacaaaagatgtgaccgctttccatgcttgagattcagagcagaagaagtttaggaaagtcattatgtcaagccaactagaaactagcagagaccttggtacagcactccatagcaagaagtggcaggagactacaaggacagatctgtgagcattcctggaattctcagaaatcttaaaggaaataagctaggtttaaaaaaattttaaaaaggagggcactaagtggggtatataggaactttctgtactatgcttgcaacttttctatatgtctgaactaaaataaaaggctaatttaaattttcaaaacattttgtttcattttacaatggctggatagattttcagatctttaatgaagcaggtcctatatgactagagccaaattacagagataggcaggtacccatcaaaacccaattaagcctgacacagtggctcatgcctataatcccagcaatgggaggctaaggcaagaggatcacttgagcccaggagttcagggctctagtgaactatgatcacaccactaccctccagcctgggaaacacagtgagaccttttctctttaaaaaaaaaaaaaaaaaaaatttacagttaatcttgcttaatcttttactggctcatttttggctgtatcatggagttgctggcctcagtcttctccttttcctccatttaatcatttattttacagaaccttttttttcagtttaatgaaacacaaactctcaattttttatttaaaacagaaatgcaataaatatataagctaaacatttcctcatcatatggaaaaagaagaaagcatcagtaatcctctttgggctgaacaaaaattcataaatatttatatattttaaaatatgatactgtttcaaatattactagggcaataaatcatatagagagattcaaccagtcagaattagacttttaaagaattactctcaaaggctgaaataactccaaagaccagggagtttactaagaacatttacaaagatagctttttggtgctgagctgtatctcatttaatgcagccagaaagaaagaagaaatatttttctccttattttgctgatctgtcagattttgctcaagttagaagagcctacaatttcaaggctagacaactggaattccatgagttaacacaaataggagaaagactggcagaaaagttcaaaacttacaatatggagggaaatcagccaaataggattacttataaatggaatattgggcatgtggtttcttaattttcattagttatgcaaatattttattgttagtatttagattagtgttttagaatgttttgtagagactgaaaagcaaataagtaattgcattagcattgttaagtatcagtgtttttagtttgatgaatgatcatacagctgtgttctcaggctgcaataacaaaacactagagactggatggctgaaccaacagaaatttatttctcacagtctgggggctggaagtcgaagacataggtgccagcagggtgggggggggggttcattgtgaggcttctcctcttggcttgtaggtggctgccatctctctgtgtgctcccatgccctcttgtttgtgtgcacagggaggaagggaacaagctctctggggtctctccctataaggacaccagtcttagcagatcagattctccactgtgacttcgtgtaaccttaattacttccttagcagccccagctccacagtgaaggttggggcttcaacatgggaatttaggggtgaggatgggacacaaacattcagtccataacaatggcccaccaaactatgaaagcaaatagaaaaaaaaatcacagttcaagaatgacataaaacttaagtagttatgctatagagtaatgcatacagctacgctgagatgttacaatgtaacaacataaactcactgcattttttttcttcttcttctttttgagacagtctcactctgttgcccaggctggagtacagtgacatgatctcagctcactgcaacctctgcctccaggattcaagtgattctcatgcttcagcctcccaagtagctgggatacaggcatgcaccaccatgccctgctaatttttgtatttttagtagagatggggtttctccatgttggccaggctggtcttgaactcctgacctcaggtgatccacctgcctcagcctcccaaacagctgggattacaggtgtgagccaccgtgcctggccaacgctcattgatttttaaagaaaatctttcccaagtttgttcaccgtacatctgatacacactttcagaaccagatttgggtttctaatattaacttctactgaaagccagcattttctcttggcctataatttctctgtaaaggtaccattaatgttcactattacaattaagccttggtctgggttattctgataacaaactctggagatcacaattttaaggattaaataatcataacaatattgtttgttctgccgaaatgattaatctgacagtgactgaattatcttgggactctcccaagccctaaatgaatacagcaaagataaattcaggaaacaactgcttctcctatggcctgtaagctcctaacagaccatgcttctgcagaaaacaattctggacaaattttttaaagcaacaaactacacgaagtcacataaaagaactcgagaactccagccttggaagaaaggccacaggctgagtttcttatttttatggcttttacccagagagcaagacacaggtctgcattgtgcagcacagctaaagttcctttagaaaaccaccatctttctggctgcaagagtcaggggtcagaatggggggcagccaccactgctgaaaagagttgggggaggaacccctgaaaggagagccagaaatgggggagctccaaactctttgtgtcagctctgtccaaatctctaactgacttgtgaactaaaaagaaaggtttctaccatcagcagactgtcacccatagacatttacacagtattttggtttggagttcttcctaatagtcacttcacagaaaaatatataggtgctgttttgccctggaagccagacagatcagaatattgggtaagatagctgggtcagctgtccttggatggatcccaaacactatgctcctttccaggcctgagaatcgccggacactgtccaacacaatgtgcacacccaacatatcacatgcatcactgagctgcaccaccattttcttcctcattgctttcaagagcttagactgatactgctccacttctgtcacggtgctgacaagcacagcaacatcctttggagaatagcccctttcaaagaagcacctgcaggtgtctgccacataggtcactatttgctccaaagtaaagtttttaataatctttgtgttgcctggaacacctggaacccatttagcttcactgagaattgccagatacccatgggggatattaattggaggattttctataattagttgcatttcttgttgtatgtactcggctatttcatctgcattgcgaactactctggtgagctcttctcttggatactgtgctgagagagggggaaggccactgtgacccaagtgactggtctgaaagtagtccagaaagatccagagaactcctggacaatccttttctctctgagtgatggtttttgccttcctataccagtccccatcttcagtacggaaattctgagcttcgtcaatgacgatgtgttgaatgtgttcaaatttttctcttaggaaagtttcccgggtctctgctcggcagatatttctatcactgtaaaaattaaaagaatacactcaggttttctctaagaaaacaaggggagaaaatgattgtatcatgttcctccgagcacagtatattgccacagatcattttaccactcaattctcaaggaagaaggtgacttagcagaaaaaattaaacccagattaaataaaacttaaagacgtaagatccaactgcttacctgataaagttcctcagaggctggttttcacaaacgtagagaattctgtgtgcctcacagtgaaacacattcctgatcttctccatgatcttcatggccatgatggtcttccctgagccaggtaagccgtggacaaacaactctctgttcttgcggaggcttctggagaatatctcatactgctgggctgtgagcagatttaaaacctcacagccgagctggtcactcaagagagacctgaagccgagtaagacaatcacgagggactgcagcagggcttccatgtgctgggtgcctgcaaggctataggacgcagggtaatccatcggagacactgcagcctccaaggcctctgcgctgctctcaggactcaggcagaggaccttggccctgacacacaccttcccggtgtagccccccatgttcactagcttctgcttcaaagtaaaggcggtgcgagtgcagtagtcctggccctctgcatcctgctccctgagaatggtgtagagaatgggggtgctgttctgtgctatcagcagagcatcacagatgactcctggcttctcctgcaagttcaggtccacagcccagcttctagagaggatcacaattccctgggagaaaggtcgcatttgcttgtgtattaactcctttagtccttcatgctgtaaagacagctccttccagagggactctggagtacattccaaatgtcctggtggaactagacaggaagaaaatagaaagatgttttcactgtgtttatgtgattttgtatgaatcacatgttacatttaaaagacagaggaaagcccccaaagaattgtacaatttaacagaaattccttctggtgcatctctggttttttgtttgtttgtttgtctgtctgtctgtttttgagacggagtctcgctctgtcgcccaggctggagtgcagtggcccgatcttggctcactgcaagctctgcctcccaggttcaggccattctcctgcctcagcctcccaagtagctgggactacaggctcctgccaccacgcccggctatttttttgtatttttagtagagacagggtttccccatgttggccaggatggtctcgatctcctgacctcatgatctgcccgcctcggcctcccaaagtgctgggattacaggcatgagccaccacgccttgcctggtgcatatctctttaacccacaacctacaaatctggtaaaatgaatgatgtcacccttctatgtatctcatggacagtggagcatgtcaactgaaatgcaatttactgagcctgagaaagtgaaagccatgtattcaattactcttgcaccttggattcttaatgtggaatgtttaaaaacttttctgataagctaatgactataaagctctcaggtaagtaaagaaactatttggtggtaaacagacctaaggaaggcctaatatatgaattaccttgcccttcataaatgtttggacatacgtaggatatttgtgtatcatattcttttgtcaaatctcatacttaatatgttcaatgtatgaagttaagccatttccctccttgaaaaatctaggtttcattttgtaagtaggaactccgagaaaaaaaccttgctaaaaaatgtttgggcagcagggagaggggttacataacattgtctatgggcttgaattattatttggtgccacctttgaagcattagcgagtcgttccctctagcctcttccaaagagaaattatttgtggtttttctatattcttatattctaccaggtgaatgtttttattccttttacagacataattcctccatccttgaaaagtagaccagaagtggctagttattccattgttccccttgtagttgtactagatcactggtttccaaacccagcagggcatcagaataatttgggaagcttgcccaaatgcatatggctaggcctttcccctggaaattaagcgttcataagttcttggtgtgggcctggagatctgcatgtttaactaccttccatggcatttctaataatcagccagatgtggcaaccaatgggccagatgatttctaaaggcacctgaaactcatccccaagaggcttgtggcattgtcactgtgtacacctggatctgcaggacacaatctttcatggatttgttttccacgaaatgtattaaatgacttccttctctcctgatgtaaaaactggcagtcagtacctggaaataaatgttgttgtagatcagctttgtgttccagacctttcttagaatacactggtctgcaaagtgaaggactgtcagatagactcaactgagactcaaaggcctcagcaaagtctggaggaaactctgaaagaaagaacattttaatttacactatatgatttcatgtctcgctattggaataggctgtacaaggctgtgtctaaatttcatctaacatggtacaagtcaggccacaaagtcagatgctttaccctttcttgactctatgtccaggttcccaaagattcatcattaaaagccctttttctgatccttgaatggtgtttccccatgcaatataatgccccctcttccatgtttgaatagttctttgcttgaattgcagtggaaaaaaactctctttaagttataatcatcaggtttttatatccctgtgcacgcacctccactaacctcaacttaaacaaacctcaaccaacactagctcttgtctcccagagttgattttatgctaatctgaggtacaagctaatcactattatgaggctccaacagattccaattcaatggttttattaaaggaaccaatttccaaggtttttcctttgcttcttcttttgtgggaaatcaccattcacaaaatatctcattttggctttttctcacccaataaaacttcccatctatgaaaagcatggagatttagagaaagtaaatttcagtgggtgtgagaaggtcaagcttagagaataaagaaggaagtggtattggggaagaggtagaaaggtcaggaagggagaatctggttccctcttacctggatctgcgtccatcattttctctacccattcctcagttgtcaaggggcggatgtacttctccctcaccatccatgacttgggagcttccgagaacaccacacaacagaatgccttcactttaatcacacagagatagccatacaactctttcccacaaaacacttctacgattttggtgctgtactctacccgaggttttgaagagcaaaaatgaacaatgggcaacttagaaattgctcttgcaattacatttttcaaagagtcagggtcaacctgttctttggcacatcccaggactttcctactcttatcatccactccaataaaaagatagcctccctcagtgtttgcaaatgcagagatgtactctggaattatattttctacatattgttggatatgttttgtagagaactgtttaaactctatggatggagactcaggaaaagataggatttcaccatattcaatagtgtcagtttggaaaacttcatatgcaggatttgactcagatatgttctggtatacagctttcataattttactaggtggagacccttcattaatcagattatatttggactgtctttccttggtcttcaggaaatcgaatgcctgtcttgaattcatgtgaagcacagaggtgccagatctacagtataatgaagaactaaggctgcaaatgcgggaattgaaagaaccatctttaaggaaaggatcaccactccaagatttaacaaaaatataaaaacaccttccgtgttgcttagtctcaaagaaagcctgcaaatatggatactgaataagctttctcaaggattcttctaaatccagtcccatctctgtgggacgctcatccctgttggccatttccatctgaatcactcctcctcctgagtttaataaagcacacgcggcccgtataactctcgccctctcttggtctctctgagttttctgtagcttttttctgttttcttctcccagagtcacttctccgacatcgatgaccaggtctgggtaagatggatacacacccagggagcagtgatttgcctccatgttgaacttgcaccttaaagtattagaatatttgtttcatttttgattaaaaaattgttacaggcctgcaattcatttattagaaaatatttaaaacgtgtctaatatgtgctgggataagacaatagcaagaaagacaggtatagtctctttaggagctgactggctggcagggaagggaactaatgaaattagcctttaccatcatctgtgacatgggctctaagagggaaaacacattgaatagggtatctgaacgaatctggagaccatggttccataagacttccaggagtaggttccatttaggccaagacttaaaagatgcactagaactggccaggtgaaatcattagcattgaaacacagaagtagtggatcagctgaggggcatgtgtaccatggcatgagaacatctaggtttggaacagattctccatgaacatcaactttagaagataagtaaaagaagaccacattgaaaaggagactgtagaaaagtctgagtatgaaaaatcaaagaagtaagagaaaaatcaagggtatttggtattaacaaagcctggaacaaagtcacctgccaaggttttaagatgtctaatactgctgacagatacagctaggtaatgactggaaagtgttactaaacctaagtttagtaaaattaaggttaactgtgactttgaaaaatgctcttcagacacctgggaaatgggcatcaggaggcaataaaccaggggctaaggtcttggagaacagagtcaatgaagatggcttgaattccagttctgccatttagtactgttatattagtctagatatttactctttctaactctattttcttactataaaacatggtgcagccacctgtgactgttattatgaagattaactcagatagtttacaacaagcatttaaaactatgctttggttcacaggtgttcagcaaaggaacctatattaattgacattattttacaatgggttgaggaatgaatgagaggtaaggaagtagcatcatcaagtgtacacctgctgtcttcttacaccaaaatcagtcctgaagtacctgtaggcagaaacatgtttagagagaggcagcagagttcagaggtcaagattcagaaataaaggctgggacattcacaatcttaccagtttgcctaatttagacccttgcctagaaatttctaccgtcaggattctgtcttgcattccgagaccactgaaacatctttgtcaagttacctgtaaaatattctttttgatatatggggacttcaaagttaaatcttttctctttacccccatgaactttattgttaaagcctagataagctgatagtttttcattggtaactgtattcaaatggcaaccccacccatatcttttgcaggcagaaaagtcttagggagctctatcccagctcttcctttgggtataaaggtattatagtcagtgctacttgcagattctttgtaaggtagagatattgtttcctaaataaaattgaaaccctaaataaaactgaactattcaataacaaattgagaattcaggtgaaaaaaatcaggaagcttaccaatatatttaacaaaagcaactgattctgttgtatttacagaataactttgctagaattcctttcttaatgtaaccagacttcccaccagcacagtgaatgcccaccgcctgctgtcttcttccaccaaaatcagtcctgaaagacctgtatgcagaaacatgtagagagaggcagtagagttcaggggtcaagattcagacttctttgaaccccccctacacatgcatgggaataattagagataattcttgcccttgcttctctgtggaaattgatggaaacagtttcgcctcctacacaggtatactgtaggtaaaatcagaacaacacaaatcctcccatccactcccaagccccccaccccactgaggaaaactggtggggactggctagtctcaggcagaaacagaaggaaacagctgcgacagaggctccctcttgggaaaataaaacacagagctctttgtccttctcagatagcagctctgtattttacagacgttgggagggagacatttttctcatttctcccctttctagattgcagggtaatcaggataatgggtacagggtaatggcaattctaattctgttttgttgttttgttttgttttgttttgtttttgttttgatacaatgtcttcctgtgttgtccaggctggagggcagtggcgccatcacaggctcaggcgatttttgcctcagcctccggagaagctggaaccacaggtgcgcgccaccaggcccggttaatttattaatattagtattatattattattattattattattcatagcgatagggtctccctacattgcccaggctggtctcgaaatcctgggctcaagtaatcctcccacttggcctttcaaagtgctgaagctacaggcatgagccaccacacccggcctaattctgctttttaactcttagattaagaacaataatttacagtggttagtgagtcaatgccaagaaccctgaaacaagagtcccaaccttcgcaacgggggaagcctccaggacgcacttggctctgcctgtttgttccgcccccgcggaaaccgctgctcgctgggcaggggctttctgttttgcagccggaacaggaacacagatagcccgccaagccgccggcgacaccttccaacccctttagctctccgcaccgtccctccccaccgccccgcctccacccgcgccgcgatcaagtcctcatagccttttagggaatttgctcagcaaactagccgaaccccaaaggcaggggagaagcacgcaaataccccgactccaccggctggccggagctggggggcgggggttgctctcctagcttgctccccatccgagtcaacgccagtccagggtcgtgccggactagaccctagggcgtgggtacaaacgggagctccgcagtccccgtaggagcagggaccctctcttacctctcaagctccagcgcgtcaagctccaggacactccgcgtttccctggaggcgccaaggtcaggttcttataaccaatggttggcgcctacctgggcaggtcccacacaggggatgaacgaaccaatgggtcccaggcagggcatggacgcgccaatgggagtgtctacaaagcccgggaacactttgccacgctgtctagaaggcctggcgggaggctcgcgcctatgaaatcccagcactttgggaggcctaagcgggttcatcgcttgagccaagaagttcgagaccagcctggacagcacagtgggacccccgtctgtacaacaacaacaacaacaacaacaacaacaaaattactcaggcttagtggcgcgcgcctgtagactcaaatgtagtctcagatgcccgggaggctgaggctggaggatcacttgagcccgaggaagtccagggtaaagtgagtcgagatcgcaccactgcactccagcttgggcgacagagtgagagcctgttccccctacaaaaaaaaaaaaaaatgtctggaaacgccaagttttctgattgctttcgagtggttcttagttctttcttactccccctccgcccctcctccgtccctatctctctctcctttcccggagcctgcggtcccgccttccccggacccctcctctgagggtccagccaagctctcgcccgagctttccccttccaccgcactgcaactgcccataccccagcttgggcttctctccccactgcctgccccagaaagtgggccttgagacccgggaaccccaggtcaaaatgcgacggatgctcggatcgggcggcactcggttcctggctggatttgtggctccgcagaccccgcgccagagtgggatgtggcggcggccggtgctctgtgctcagtcaacgccttggagaggaggactacgaaacccatacactcggacagaaccctggcaggtgttaaaggctgcggcagagcagaaaagcagaaccctggctggttttcttgtaacacgagcagtgtgacggttaccggggttgaccaagcaccgcgcatcggccaagttctcactgacgcggactggcccaagggtgggagcggcggttaacaccggggtgattaatatacgctccagtggaggctaaagtgagaaaataaaacgtactccaataccacccccccttcgccccagagattaccactgaccactattaacaccctattgtacatatctttacggatcatacatatatattacacaaacatatatgtaatacttttttattaatacaaagtcacactgtatgtactcttcttaatctgcttttttcaatgacttccacctttccatttcagtaaatcttcatataatcatattccagttttttcatttttctttaaaatgcggtttatagattgtgcaaacctgtactgaatccagaactatacatctgtaaagcgctggaaaaaaaaaaaaggctgtcaatctagaattctataaccaccaaaaacaaaacaaaacaagtcctccaaaatggaggcaaaataacgacgtattcagaccaaaaaaaaaaaaaaaatcttaggaaatttgtcaccagcagatctttacaaaaactattaacgtgtttttttgttttttgtttgtttgtttgtttgtttctcagatggagtctcgctcttgttgcccaggctggagtgcaatggcgcgatctcagctcactgcaacctccgcctcccaggttcaagcgattctccttcctcagcctcccgagtagctaggattacaggcgcccgctaccaggccctgctaatttttgcatttttagtagagacgggggattcaccatgttggccaggctgatctcaaactcctgacctcaggtgatccacccgcctcgacctcccaaagtgctaggattacaggcatgagccactgcgcccggcctaacaaagttcttcatattgaaggaaaatgataccagaatgaaactcagatctacacaaaagaatgaggagcatggaagataataaacgcgtaggtaactataaaagattctctttttcattgttaaaaattattcataaaataattgatctttaaagaaaaactatgtattgtggtgcttataacaatgaagacatgaaaattgtgataattgcaacgcaaaggaaggaaggggaaaatgagtgtgtattgttttaaggttcttatatcacacatgaagtcatatactatgatttaactgtattaagttgaaggtgcatattgtaagccctagagctaccactaaaaaaaaagggaacaaaatcatatagactgtaagtcaacaaaggagttttccttgtgactcttattttcttgctgtttttataaaactttacttttacctgtttttgttttataaacatgcaattaactttgtatgctttttttttttttttttgccaactttgctaaactttgtagttaattttgacgatcaatctctatgttcttttaggtcatctaagaaaacaataatatcaaatgtgcataatgagagttttatttcttcctttgtaatctgcatacttttcttgtttccttttcatgtataatgcattggccaggactttcagcacaatgctaaatgaacgaactggtacctaaagacacaacctaaccgtactaaaattccatctttggggatctgtttcctgggatcgccttaaagaacagtttctgtgttagtcagggtcctgtcagaagaccagttattttgaacagagatgttttaaaatgaagaactattcactagacataaagactttttaactcaatcatggaaaaggcaaaaaagtaacaccacagtattatggaggtaactatggaaaagagccatcaactctgaggctaggagaacaaatggaagagatctttgagggagcataaggcagccactgtgagtgttgggaaaatttttttaaaaatctgaaaggtgtttatgggaaagtttataaaaccttattggaaaataataaatatataaataggttaaatcatataccatgtccatggattggaaaacccaacatattaaagaccactttgggaggctggggcgggcggatcacctgaggtcgggagttcaagaccagcctggccaacaggcaggagaattgcttgaacccgggagacagaggttgtggtgagccaaaatcatgccattgcactccagcctgggcaacaagagagaaactccatctcaaaaacaaaaaaataataataattctcaccaaactgatgagtagatccattgagattccattttaaatcccagcagtattttcctagaacattacacactgattatagatttatatataagactcgaaacactctttaaaagaaaaagcacgttgtgagcagacatcaaattttcttatatagcaaaaataattagaaaaaatagagcatggaataaatgacagagcctaggactcacatattgatggaaaaatctatgacagaagtagcattgcagttaagtggggaaaggagagactattttataaattgtgttgagatatctggtatccctagagaaaaaaatattaatttgcatcctgtcctccaaaatctattctgctaaaataaaaacataaatacaaaaaaacaaaatcagtaaatttttaagataatacaggggccaggtgcagtggctcatgcctataatcccagcactttgtgggggggtcaaggtggactgatcacttgagtccaggagttcgagaccaggctgggaaacatagtgaagctccatctctaccaaaaatacaaaaattagccaggcatggtggtgtacgcctgtggtcccagctactcgggaggctgaagcaggagaatcacttgaacccaggagctggaggttgctgtgagctgagatcacaccactgcactccagcctgggtaacagagcaagaccctgtcttccaaaaaaaaaaggcaaaaccatgatgttcccacctgttatggctgttaacgaacctcttccttacagacagctggaaaatgactaggcagtggtgatataaccaatatatccaaggcctgaccaattacgtgggaacccttcttaagtacagattccataagtagaaattgtgcctttgcaaattaggttactcactttctttttttatcttatatgagatgccttctttttctcaactcacatttcacattcacatgccttttttagtctttacataaatacagaatttactttttcatgtacagtaaaatttaccttttatgtatagttctattaacacatgtttagaatcatgtaaccaccacaaaacagaatagagccaccaccaccacacacacacacacacacaaacacacacacacaaactaatgatttcccccaattccagtccctgcaaagcacatatttgttctctatccctagttttctcttttccaggatggtgtataactgtaatcaaatagtatgtaaccatttgggattggcttctttgcataatatctttgagtttcttccctgctgtgtctgttaatttttcattcctttcgattgctgagtggtattccattgtttggatgtaccactttttgtttaaccattaacccattggaagacattcaggttgtttcctgggtttgttaattatgaatagaactgctacaaatagccatgtatagctgtgatggttaatactgagtgtcaacttgattggattaaaggatacaaagtattgatcctgagtgtgtctgtgagggtgttgccaaaagatacttgcttttgagtcagtgggctgggtaaggcagatccactcttaatctggtgggcacactctaaccagctttcaatgaatataaagcaggcagaaaaacgtgaaaatgagagatgggcctatcctcccagcctacatctttctcctgtcctggatgcttcctgctcttgaacatcggactccaagttcttcagttttgagacttggactagctctccttgctcctcagcttgcagacagcctattgtgggaccttgtgatagtgtaagttaatacttaataaacttccctttatatatatatatatctcctattagttctgtccctctaagagaaccctaactaatacagattttggtaccaggagtggttctaaaggaacagatattaaggatggagttttttcattggtttaggggtttctggagttggctgcttaataggattagacccaaaaatgctaaggactctacttctaacagtatggagaacactgatagtccttcacatgaactgtttagagagttgtgcaaaataaatgcatttggcactcctgattcactgctcatgagaggcaaggggtttagtgacactgcctaatacttttgaccatatgcggagaaccaaggaacgtaatgaagctggttggttgctcctaagttcagtaggcaaagtgatgaaagaaaatgatgagctcagggattctgtctcccggcttcagaagcagatactgagcctcaaatctgctaagattaccctgagtgagagccttatctcctgtagagaaagagctgaaattgtggaaaaacagacacaagctcttatgcgagtggctgacctgcaacaaaagatgcatgcatagcctcgccaggtgtctactgttaaagtgagggcattggttggaaaagaatgggaccctgcaacttggaatggggaaatgtgggaacaccctgatgaagctggggacactgagtttgtaaactctgatgaacttagtgagaagggagagcttccccatcccaagtagtggcaacatcccctcctcgacccatgctgccatcagcctttcctccttcgtctgaggagatgaaccctgcgctgcctgaggtaacagtgatggcctcccctgaggcagttgccaggcaagataatgttgattctcctcaggagccacccccaacaccctgtttgcttctagacctataaccaaactaaagtcccagcaggcccctggaggtgaggttgagagtgtgacctatgaggaggtgcaatacactcaaaaagaactgtttgagttccctaatttatataaacagcaatctggagaacaggcatgggaatggatattaagggtatgggataatggtggaaggaacatagagttggatcagtttgaatttattgatctggacaaccaaagttgccatggtggcagggatggcggttatgcatgggctcaggaacatggacttccactcaccaaggctgacctggctatggccactgctgagtgcccaattttccagcagcagagaccaacactgagcactcaatatggtaccattcctcggggcgatcagccagccacctggtggcaagttaattatattggacctcttccatcatggaaatggcggaggtttgtcctcactggaatagacacttactccggatatagtttgcctatcctgcacgcaatgcttctgccaagactaccatcgatggattcacggaatgcctcatccaccatcatagtattccacacagcattgcctctcaccaaggcactcactttacagctaaagaagtgtggcagtgggctcatgctcatggaattcactggtcttaacatgttccccatcgtcctgaagcagctggattgataaaacagtggaatggccttttaaaggcacaattaaaatgccaactatgtgacaatactttgcagcactggagcaaagttctccaaaaggctgtgtatgctctgaatcagcatccaatatatggtactgtttctcccatagccaggattcactggtccaggaatcgaggggtgaaagtggaagtggcatcactcaccatcacccctagtgagccactagcaaaatttttgcttcctgttcccgtgacattaggttatgctggcctagaggtcctagctgcagagggaggaatgctgccaccagaagacacaacaatgattccattaaactggaagttaagattgccacctggacactttgggcacctcctacctttaagtcagactaagaagggacttgcagtgttggctggggtgattgtcccaaactatcaagatgaaaccagtctaccactccacaatggagttaaggaagagtactcatggaatacaggagatccactagggagtctcttagtattaccatgccctgtgattaaggtcaatggaaaactacaacagcccaatccaggcaggactacaaatggtccagatccttcaggaatgaaggtttgggtcactccaccagggaaaaaaaaaccatgacctgctgatgcacttgctgaagacaaagagaatacagaatgggtagtagaagaaagtagtcatcaataccagctatggccacgaccagctgcagaaacgaagactgtaattgtcatgagtatttcctccttcttttattaaaaacatgtttgtgcatgtatacacttgtactaagaaaatatcttcattttatttccttttcctttatcatgtgacataagatttattgacttcatatcagcatttaagtattgttaactttaggtaatagtatttgggttagggattggtgcatttctagttgtatgaaggatagttgtattatgctaaacataattatgacttcattattgtctttatttgaatattatgtataatctcaaatggagatgtttttgggttcaagttgacaaggagaggacttgtgatggttaatactgagtgtcaacttgattggattgagggatacaaagtattaatcctgggtgtgtctgtgtgggtgttgccaaaagagattaaaatttgagtcagtgggctggggaaggcagatccacccttaatctggtgggcacaatctaatcagcttccagtgaatataaagcaggcaggaaaatgtgaaaaggagagacaggcttggcctcccagcctacatcttcagattcttcagtttgggaactctgactgtctctccttgctcctcagcctgcagacagtctattgtgggatgctgtgattgtgaaagttaatacttaataaactcatatatatatgttatatatattaggatatataataagatatatattatatataatagttctatccctgttagttcagtccctctaagagaactctaatacaagctacgtcccagagactccggtattttatctctttgttctcattagtttcaaagaacttttttattcctgccttaatttcattatttactcaggagtcattcaggagcaggttgttcaatttccacgtagttgtgtgatttttaagttagtttcttaatcttaagttctaatttgattgcactgtgatctgagagactgttatgatttcagttgttttgcacttgctgaggagtgttttacttccaattatgtgatcaattttagagtgagtgccatgtggtgatgagaagaatgtatattctgttgtttttggatggagagttctgtagatatctgtcagatcgcctagatccagagctgagttccagtcctgagtatctttgttaattttctgtctcaatattctgtctgatatcgtcagtggggtgttaaagtctcctactattattgtgtgggagtctaagtctctttgcaggtctctaagaacttgcgttatgaatctgggtgctcctgtattggatgcatatatacttaggatagttagctcttcttgttgcattgatccctttaccattatgtaatggccttctttgtcttttttgatctttgttggtttaaattctgttctgtcagagactaggattgcaacccctgctttttctctgctttccatctgcttgctaaatcttcctccatctttttattttgagcctatgtttgtctgtacatgagttgggtctcttgaatacagcataccgatgagtcttgactctatccagcttgccattctgtgtcttttaattggggcatttagcccatttacatttaaggttaatattcttatgtgtgaatttgatcctgtcatcatgatgctagctggttattttgcagacttgtttatatggttgtttcatagtgttactggtctgagtacttcagtgtgtttttgcagtggctggtaatggtttttcctttccatatttagtgcttccttcaggagctcttgcaaaggcaggcctggtggctgtgaattccctcagcttttgtttatctagaaaggatctgatttctccttcgcttatgaaacttagtttgcccggaaatgaaattctgggctggaaattcttttcttaagaatgttgaatattggcccccaatctcttctgccttgtagggtttctgttgagaggtctgctgttagtctcatgggcttctttttgtaggtgacctggcatttctctgtggctgcccttaacattttttctttcatttcaaccttggagactctgaatgattatgtgtcttggggttgatcttctcatggagtatcttactggggttcactgcatttcctgaatttgaatgttggcctgtcttgctaggttggggaagttctcctggatgatatcctaaagtatgttttccaacttggttccattctccccacctctttcaggtaccccaatcagttgtaggtttggtctttttacataatcccatatttctcagaggttttgttcattccttttacttcttttttcctctaatcttgtttgcctgacttatttcagaaagatagtcctcaaactctgagattctttcctccacttagtctatgtggttattgatacttgtgattgcattgtgaagtgctcgtgtgtttttcagctccatcaggtcatttatgttcctctctaaactggctactgtagtcaccagctcctgtaatgttttatcatgattcttagcttctttgcattgggttagaacatgatcctttacttcagtgaagtttattgctacccaccttctgaagcctacttctgtcaactcatccatctcagcctctgctcagttctgtgctcttgctggaaaaatgttgtgatcatttggaggagaagagaccctctggctttttaagttttcagagtttccgcatggattctttctcatttttgtgggcttatctaccaccaatctttgaggctgccgactttcaaattttgcaatggtctcagcagaaaataaacagtccacaatttaaacagaactcatagcattacaaaagtttacagaacccctatgttttcatcatttgtttctaacaacaaagattacaacgacagaattgaatgatcagaatgtaaaaatatttgtgcaaaactgcattaattgttcttactatctaataggggtaaaacttaagaacacacaatgacaataatgaagaaaaactacattaaaagtaattctactttagatttcaaacatgaattatattattactaaacattaaaaaaaaaagtggcaccatgagagcagcaggagcaacaaattatgccagctaaggaaagctgacactggaatatgccaaagttaatctccacaataggtatccatctgaaaagactggaaacaaccgtagggcctaaaactcacttcaatttatttattcttgaatttgtaggtcttaattgaagtatttaagaaagtcttttcccctccctctcaaggagtgtttcttgctttactgtcaatcattcgaagagttgaatcatagactctggatttaccaacaccaatccatttaactggaatttgaagctcatcttcaataaatcgaacatagttttgtgcattaacaggtagttctttaaatgcccttgcatttgatatgtctgtgttccattctcatggagtcttatattgaacttcaactttaagacttcttgatttgctggaatatgaggtatgatttgaccatctaacttgtaagcaactccaactttgatttccataaacatgtccaaaatattcaacttggtaacttccagcgcagtaaatccattgataatatgagcatatttgagcaaaacgaggtccaaccagccacatcttcttttccttccaatagttacaccaaactctctaccctttgtttgtaataattctccaatttccttgagattttgtaattcaccttcaatgtctatttccaaagtgggatgtatagatttgtattgtttagctggaactttaaacatctcagagaagccaacaaggtcagaaacaagatcgcacatcctaagtccactccgagcagctttggaagaataaactgggccaatgcccttttttgttgtacccaaattttttcctgcttgttcttgtctctgttgttcctggacaccatcagcggcttgatgaaaatcaaatacaatatgagctctgtcagataaaataagcctttttcccagccttctagtccttttcctttttgaacatttttctctgcttcttcaaacaatccaggtagatgaattaccacaccatttccattgaatgcagtaacatttggaataattattccactgggtaagagatgaaaatcatactccacagaatgcacaacaactgtatggccagcattatttcctccctggcagcggcacatggggtcctgcgccagtagatccgccacctcccctttgccttcgtcgccccactgcacaccgagcaccaccgtcacccagtttcctctgggccgcgccctggggcggccgcaatcgccgctgggcagggaggatgcctccaggtagttcttggcgaacgccgcagctccggtgacgcgaggagagccggaaggagacgcggccggcgagaggtgagcgaactgtattgctctgcggcctccagccacctgcggaggaagagggagccagaggccggccccgcccccgcccccgccccgctgggctgccacactccagccaatccctgccccgctctccgccacaacccgctcaagtagggggactctgactgccccgcgcaggtggcctgccttggcagcaccgcccgcgggaagtggcggcctggcgcgctactcggagaaggccataatttagcctaccacactaatatgtgcacttaaattttactcatcactgaatctcctcactctcattatctatgtctcacgaattttgatatgttttcattttcactcgactgcatttttaaaatttaccctgagacaacctctttgtcctatggattacttagaagtacgttttaactttctaagtgtttggaaattttcctgttacctttctgccattgatttgtagtttggttccattttggtcatagaacacactctgagtataatttcaattctttaacatttgtttaggtttgttttatggctcaggttctggtctatcttggtatatgttccataggcatttgagaagaatatatgttttgctgttgttgagtaacatgttgactggtggtgttaagttcttctatacccttgcagattttctttaagacggggtctcgctctgtcactgaggctggagtgcagtggcatgatcatagttcactgcaacctcatttcctggactcaagcaagcctcccacttcagcctctcaagtagctagaactacaggcatgcaccaacatgcccccccagaaattttttttaagaatggggtcttgctgtgttgtgcaggctgctctcaaatctgccttatagattttttggtctacttgtactacgaggtacaagggtgatgacgtccctaactacaattgtgaagtctacttctcctttcagtgctatcactttttgtgtcacatattttgcagctctgttgtttgatatacatacatgtagatggccatatcttcctggttaactgatcttttcatcattaatataatatccctatgcgtctctggtaattttctttactttatctgatatttgtatagccgcacctgctctcttttgtttgcataatatgtctttttttttttttttttttttttttagacgaagccttgctctgtcacccaggctggagtgcagtggcacaatcttggctcactgcagtctcagcatcccaggttcaagtgatcctcccacctcagcctcccaagtagctgagattacaggcacccaccaccaagtccacctaatttttgtatttttagtagagatgggggggtttcaccatgttggccagtctggtcttgaactcttggcctcaactgatccaccaccttggcctcccagagtgctggaattacaggtgtgagccaccatacctggccctacatgatatgcctttttccatcattttattttcaactttcatacatttgaagtgagttccttatagacaccatacactgggtcataatttttaatccactctgccaaatggttctttaattggtatatttagaccctttatatattatataattattgatatgtttgggcttaagtatgccattttattttttgatttctatttcttctctgtgttcttaatatttttttcttttccctgccttcctatgggttgaatattgggcagaattctgagttatctattatgtttttagtgtatctcgttgtatagcttttatagtaattgctgtaggtattacattatatatacataatttttcacagtgaactggtgtcatcattttactagttctagtgaaatatagaaattttacctccagtcatgtctctttaaccacctttctttgtttataataaaattgtattaaatatttcctctacaaacatgtagaaccacatcagagaatgttataatttttactccaactgtcaaacataatttagaagactcaagcagagagagaaagcatattgcatttacccatatttttacttactgtgttctttcttcctttctgatgttccataactccttttttttttttcattgcctccctgtttagataacttcttttagctgttctgttagagtaggtcttttggtgatggcaatgaattctcttatttttccttcatctgagaatgccttggttttcctttcattcctaaagaatacattctctgtgcataggattctgagttgagagttctttttattcagtacttgaaaaatgttatgacactttcttctgttctccatgattccactgtcattcaaattgttattctctataaagaaggtgttttcactggctgctttaaatatattttatgtccttagttttcagatatttaattaaaatttgtcttggcacaattttctttgagtttatcttgtttgggatttgcttagctccttgactctgtgtttacctgagttatcaggtaaatatccaagagaacaaaaaaggaaaaaaatgattgggacaaaggagaccaaaaggagtgaaagagagaaggaaaattttaacctagagatacaagccactctaaaatattttgtttaacaaaaaagtgggagaaagtggactgcaggggcttgtccagggaaaggctactgccaagaagcactgtgtccctttctcctccattctttcctcttatcagtcagagatagaaactaaaacagcctaaaactggggggtgtagtgtgacggatccccgaccaggttacttaagggtttatttttgctgcttgcaccctgaaggctgagcactgagcaaaggccatgatgcctacctgaggagaaggtgtccctgacaacccaaacatcccagaatgtctctgggaacataccaaggaaaacagtctcattgcaaacagtaggcaaagagccagaatattcgcttaaaagaagcttagggctgggtgatggggcaggtctctggagctatcctgctcccaccaggaataccttgtatgtaagtcctgataaattcatctactcacaaacctagatttgtctgagccattctttggtttcttggctccttctcagtttgggagtatgttgcagtcccagtttttcttgtaacagcatgagggagaggaatagaaaaaaaaaaaacctgaattcagggtgcctaagtctattttgtgttataaggaattcctgaggctgtgtaatttgtaaagaaaaaggatgcatttggctcacaattctgatgtctaggaaagttcaagattgggcatctgcatccggttatgtcctcaggctgcttccactcatggcaggaggcaaagagaagccagtgtgtgcagagatcacaaggcaagagaggaaacaagagtagagagaggtgccagggtctttttaacaaccaactcttatgggaactaataaagtcagaactcacccccaagaaagggcattaatctattcatgagacatcctcccccatgaccccaacaccttccattgggctccctctccaacactgaggatcaaatttcgacatggggtttggaggggaccaaacatccaaactatagcacagggagagaaaaaaaataaccaactgaattatatgtagataaaatttttgttaatttttattttaggtttgggggcgcatgtgaaggctcattacacaggtaaacatgtgtcatggggttttgttatacatattatttcatcacccaggtattaagcccatacccaatagttaacttttctgctcctctccctcctcccaccctccccccctcaaatagaccccagtgtctgctgtttccttctttgtgttcataagttctttcgtttagctcccatttatcagtgagaagatgctggacttggttttctgttcttaagttagtttgctaagggtaatggcctccagttccatccatgttcctgcaaaagacatgatcttgttcttttttatggctgtgtagtagcccatggtgtatatgtaccacattttctttatctaatctgtcattgatgagcatttaggttaatatagacataatgaatagattgtacatgtacatagataaagatatcaaacgtatatctaaattaaaacaaacatccataatttcacccaattggaaatcgaaaatttgtataccaaagaatttatataacaaaaagatagctaaggtcgtgattgggtttagaactgtaaggttttttgttttctgttttttgctttttttagagagagataaagtcttgctctgtcacccaggctggagtgcggtggtgccatcttggctcactgcaacccccgcctcccaggttcaagtgattctcctgcctcagcttcccaagtagctgggactacgggagcacaccaccacatccagctaatttttgtattttttagtagagatgaggtttcactatatgttcgccaggctggtctcgaactcctggcctcaagtgatccgcctgtctcggcctcccaaagtgctgggattacaggcgtgagccaccacgcctggccagaactgaaagctctaaattaactttaacatttgccaaaatgcaccaattgagaaacctcgtggacttaataaatactcaaattatacttatgcctgaggttccaacaaatttaaacattgtaccccatataattttaaaaggtagctaaatagctttttaaaaatagctatgccttattttatatcttgattgaattgctcatagttgttgtactcagtgccttaaagtatctcgtattgaacatagactccatgtcacaataaataataaattaaaattaaatttttggcactcaaaaattggcttgataaaataggattatataaatcccattaaaatagttaatatggttcaatgtaagttaaaataggcccttgaaggattgaaagttgttacataaaacctcatttatataacataaaagggataaaggagataagtattccctgctgcttgtccgtttaacagcccagtgttgcctgttcttaaacctggaaaataataagcagcaggcacctcacggtggaggactacaacattattgctgtggtcttgtcgactagggcctcatagccagtatctagtatgattaacattattaactctatccaatcaataactgctaaatactctgttcttacagacttggctaatatgttcaatatgttcaattccgtgcctatttcaacagactccactgtagtttgcctccattgctgaagagacacaatatacctcttgcaggctacacctcagtaccttcacaattttgccatcatgcacacatcttacagacaagatcttttttaatacttaatttttctagagcagattcacagcaaaattgagcggaaagtacaaagattttccatatacccactgcccgcactcatgcatagcctcccccattagcaacatctcccattagtgtggtacatttgttacaattgattaatctaaattaatacatcataatcactcaaaatccattgcgacttttacattagcgttcattcttcttgtacattttatgggttcagacaaatgtataatgacatatatctactatatagtatcaaacacaggattttcatggccttaagaatcctctgtggttcaactattcattcctcccactcccttaatccttggaaaccaccgatcattttactgtctccataatcttgccttttacagaatgtcatatagttggaatcatacagtatatagccttttcagatggccttctttttaaagagacagggacagacaagatcttaagtgcatgcaccttcctctgggagcacagatatgatattacattaataacctcctccaaggagatgtcacttaatctactcatatggacataagagtccaacatcttttcatcctttttgggttttcatggcaaaatattcttcacttacaaattttacttaatctcattgagctgtaactcacaaatgaacccactttaaatgtggcagcctcaaacaaaaaggctctaaaatctatccaaattaataccaacagacagacccattggtgcctgcattgattcctttactgaagagactttaacaagctctactcatgcctcctaaagtctagaccacctgtgatggctacgaattgcctgagggctctcagcctcatgctatatgccattaaaaccacaaatgactagctccatactgggctctcctggacatagaggctttcacagattctgagtctgtgaccctccatacctggctacctgttatgctttcagtcatggaaacagcaccctgcaagctcagcctctcagagggcccaggtttgtctctaacctgtctcaaggaggctaccaagtcctgggctctctagcatattcacacgcagaagggagtgacgtccccagtccttggtcccttgccagatgccatagtgctggaggaggtcacctctcctccagaccccttggttacctggaaagctcctttggattgactgagtgaacagcaatagaagttcacggactatatgaatggcactgccaaccaccatacatgatggagctaggtggaatattaccgaatgctggatgccctggccaacaaatggccccatctccatattccttttgaacaattgagccattgcctaatgaattgtccctttcagattaaggaacactaagaacctctttcctcttagatacccaaaatcacgtgtctatgtatattaaggccaccatatgaggccttacaattaccaaggtaataaccaaggcacacatttcacattgcaaaatacacactgaatgggctcccgaaacaaacaggcattcaataaaactttcatgaccctaataggtcccaaatagccagtttaacagagagacataagagtctccccaaacaacttcttttaaagttccagtccaacaaatggacctctcaatgggtctttatcttgccccaggccttaacctatttttatagattttcaatatcaaaccccccccatcaggaggccacagcaggtgtgtatattctctggggtccaattaatagtgattgtccaatgggctaggcagctgcttatctgatatgggacccgtttgagcctaaacttcaaccatgaagcaagcaagcaagcaagcaaaaaccaaaactctgtcaaatgcagctgcacaccattctgttttctgtttatcttttttgttttgtttgtttgtttttgctttttgttttggtctgagacaaggtctcactctgttacccaggctggagtgcagtggcgtgatcacgattcactccccactctacttcctgggttcagacaatcctctcacctcagcctcctgagaagctgcgaccacaggcacacactaccacgcccagctaattttttatgttttttgtagagacagggttttaccatgttgcccaggctggtcttgaatgcctgagctcaagcaatgcacctgctttggcctctcaaagtgctgggattacaggcatgagctgccatgctcagcctgctgatcttactgctggtatgggtgcttttgttgttttatcatctggaggcaccaaccctccatacaagccattgttttaatcaatcatggcaaatgctaagacccacatcaacctgagtctgtatttacttaaaagaaatactcaagacccatatcctagatgacattttcctggataggcactcactgctggagattatgctgcctcagatgacatcgatccagcttaccgtcagagatgaatttacccctgcaccagacatggcgtcaccctaaacacaaaaaccttcaccccagtgacacccatggactgcctcttctcaggcacaaactgcacaccgaacatttggccttttttcctttgatatcagggattctattgtgtttctgagtgtgctgtctgcttagcctatcatcctggcatactccttgctctctgccaaaacatacaccccgcactcctatgcctgaaggaaaatttaatagtagttaccactacctacgtcattctaagaattaatggagggccaagcacagtgactcatgcctataattccagcactttgggaggctgaggcaggactgcttaatcccaggagttcaaaccagcctgggcaacatggggagaccccatctctacaaaacatataaaagttagctgggcatggtggtgtacacctgtagtcccagctactcaagagtctgaggcaggagaatctcttgatgtcgggaggtcaaggctgtaatgagctatgaccacaccactgcactccagcctcggtgacaagggcaagaccctgtgtctaaaaagataacaaaaattaatggatagtattgcctttctctgaaggctgttgcctcctgagtcaatccctcaacccactgggaagaggaccactaactccccagtgcctacccctactaccccctcaagctttcccccgtgacttcctgccctgtgtctctgaccatgaccactcctccttggttatacacacacgctagtctacacatgcattattaatgtattagttcctatcccccaacaacctgactgcaggacctgttttatataaaatatatatatataaaatatatatatattatatatataaatatatatataatatatatatatatgtatttcaaacttttaacccactttaaaactccaccaagataatagtaaaaacctccaaaaatttcagatctactttcttgactaatgacatgcaaatgaagaacttagttatggaccagcctacaagggctctttatacttccacattgttcttctatcttactcttacaataaaatattttctaggctatttagggcaactgtaccccatcctttaaataagtccactattaccaccccaggtttcttacgatgatgccaaataggcccaggggcaatgggtcttactgtgttttcctaggttctgtacttgtctatttggcatccattaatcacagggccaaactaatggccaacattctttacatccccgctgtgacccagagctcatactctaagctactcacacatcgagccaatattttccctaccctacataaacccagggccatgtaacagacaactggggaccgtccctaggccccaaagcccatcagaattattcaaactattgagtcctaagctgttccccctgcccagctggacctttcccacagaaaccctaataataaaggttccgaattagattttcccctcacttctgctcctctttccttaaccaactggatgctttaccacatgaccctgcatgacagagcaagtccccttctcttggaactataagtaataaagtcttttttcaatggcgctagtccatctgtgttgacactcagtcacctccataaatcaaaacttcaagagtacattttcatataatattttatcaggcatctgaaggtttcaccaaagtttatattttcctactgcaaaactatgttccatgtagatctggcccatcttgaggctattgttcctgcgttcatcctcccatggtcacatttcttggccaacagaaccatagaaattggtctgccatgtgttaacgtttagtccaaatcatttttccactttagctctgcttcaaatggggctggcctggtgatactggagacaataaatgcgcctgtaagttccagataacaggctcttgtcattttcccaatctttcctcattgcaatgttccacagctgtaggtgtgccaaggcctctgggtcccagtgtagcaccttgaatgcacagttcacacagtggtggcttcagggtgccagccaggaggagttctggtgcactcactgtttgatgatggtggtcttccccatgcccaggtcacccatcaccagcagctgatacaggctgcctgaggttcagggctggaaagactccaagagtgtgaacatgctcccactgttttaagttcttttttttttttttaatttttattatactttaagctctgggatacacgtgcagaatgtgcaggtttgttacataggtatacatgtgccatggtggtttgctgcacctattgacccatcctctgagttccctcccctcactctccccaccccacaacaggccctggtgtgtgttaatcctttccctgtgtccatgtgttctcattgttcagctcccacttatgagtgagaacatgtagtgtttcattttctgttcccatgttagtttgctgaggatgatggcttccagcttcatccatgtccctgcaaaggtcatgatctcattcctttttatggctgcacagtattccatggtgtatatgtaccacattttctttatccagtctatcactgatgggcatttgggttggttccatgcctttgctattgtaaatagtggggcaataaacatatgtgtgcatgtgtctttttttttttttttctgagacagagttttgctcttgtcacccaggctggagtgcaatggggtgatcttggctcactgcaacctctgcctcccgggttcaagcaattttcatgtctcagcctcccaagtagctgggattacagacgcctaccaccactcccagctaattcttgtatttttagtagaaatggggtttcaccatgttggccaggctggtctcaaactcctggcctcaggtgatccacccgcctcagcctcccaaagtgctgggattacaggcatgagccaccgcgccacgcctgcatgtatctttatagtagaatgatttacattcctttgggtatatacccagtaatgggattcctgggtcaaatggtatttctggttctagatccttgaggaatcgccacactgtcttccacaatggttgaactaatttacattcccaccaacagtgtaaaagcattcctatttctccacagcctcgccgtgcagtggagactttttaataatctttcttttaataaaagattatttaaaagttttaaatattcttttaataaaagattatttaaaagttttaaataatcttttatcttgacttttcaataatcaccatttgacttgtgtgagatggtgtctcattgtggttttgatttgcatttctctaatgataagtgatgttgagttttttttcatacgtttgttggctgtataaatgtcttcttttgagaaatgtctattcatatcctttatccacttttcaatggggttgttttttccttgtaaatttgtttaagttccttgtacattctgggtattagacctttgtcagatgggtagattgcaaaaattttctcccattctgtaggttgtccgttcactctgatggtggtttctttccctgtacagaagctctttagtttaattagatcccgtttgtcaactttggctttcgttgcaattgcttttggtgtttttgtcatgaagtctttgcccatgcctatgtcctgaatggtattgcctaggttttcttctagagtttttatggttttgagttttgcatttaagtctttaatctatcttgagttaatttttgtataaagtgtaaggaagggatccagtttcagttttcagtttgagtctttagtccatcttgggttaatttttgtataaggtgtaaggaagggatccagtttcagttttctgcatatggctagccagttctcccagcaccatttattgaatagaagatcctttccccattgcttgtttttgtcaagtttgtagaagatcagatggttatagatgtgtggtgttatttctgaggtctctgttctgttccattggtctatatgtctctttttatgccagtaccatgctgttttggttactgtagccatgtagtgtagtttgaagtcaggtagcataatgcctccagctttgttctttttgtttaggattatcttagctatacaaggtcttctttgattccatatgaaatttaatttcatttaattctgatttgattccatatgaaattctgtgaagaatgtcaatggtagtttgatgggaataacattgaatctataaattactttgggcaatatggccattttcatgatattgattcttcctgtttatgaggatggaatgtttttccatttgtttgtgtcttctcttgtttccttgagcagtggtttgtagttctccttgaagaggtccttcacatcccttgttagctgtatttctaggtattttattctctttttagcgattgtgaatgtgagttcactcatgatttggctctctgcttgtctattgttggtgtaatggaatgcttgtgacttttgcacattgattttgtatcctgagactttgctgaagttgcttatcagcttaaggaatttggaggctgagatgatgggattttctagatataaaatcatctcatctacaaataaagacaatttgacttcctctcttcctattcgaatacctttatttctttctcttgcctgattgccctggccggaacttccaatactatgttgaataggagtggtgagagagggcattcttgtcttgtgccaattttcaaagggaatgcttccaggttttgcccattcagtatgatattggctgtgggtttgtcatgaatagctcttattgttttgagatatgtttcatcaatacccagtttattgagagtttttaacataaagggatgttgaattttgtcagagtctttttctgcatctattgagataatcatatggtttttgtcattgtttctgtttatgtgatgaattacatttattgatttgtgtttgttgaatcagccttgcatcccagggatgaggcccacttgatcgtggtggataagcttttctgacatgccactggattcggtttgccagtattttattgatgatttttgcaatgatgttcatcagggatattggcctgaagttttcctttttttattgtgtccctaccaggttttggtatcaggatgatactggcttcataaaatgagttaggcaggattctttcctcttttattgtttggaatagtttcagtagaaatggtaccagctcctctttgtacctctggtagaattcagctgtgaatctgtctggtcctgggctttttttggttagtaattactgcctcaatttcagaacttgttattgacctgttcagggatttgacttctccctggctcagtcttgggaggttgcatgtgttcaggaatttatccatttcttctagattttctagtttatttgcatagagatgacagagtcttgctctcttgcccaagctggagtgcagtggtgtggtcttggctcactgtaacctccacttcctgcgttcaagcaattctcatgcctcagcctcccgagtagctgggactacatgtgtgtgccaccacacttggctaatttttatatttttagtagagactgggtttcaccatgttgcccaggctggtcttcaactcctgacctcaagtgatccatccaactcggcaagttctccattttgattcatctcttcattggctgcatttcattgcaatatagttttcaagaagatattagagaactatgttttccatgtccattggataagaatgtctgatatttcctttatagtcaaatgacatcttggtatggcaaaacatgtgtaggtaattaatttttctaatttcccttaaggaatatctataaagaacttaggaagaagcgaacataggctaatcccagttttccaacatcacgtcaagttgcctaacttgcaatgttttcaaagacgtatttttagagaattagagaatgttaccaaatatataatgaaaaatatctctgtagcccagtccatcttccatgattcaagtgagccttggacaagatttaaacatccttatctatactgattatctgggagatgctggaaatgtcaaaggctaattggtctataaaagaattgattctccagccgggcgcggtggctcacatctgtactcctagcactttgggagaccgggggggggggttgaatcacgaggtcaggagttcaagaccagcctggccaagacggtgaaaccccatctctgctaaaaatacaaaaaaaaaaaaattagccaggtgtggtggcaggcacatgtaatcccagctactcgggaggctgaggcagggaattgcttgaacccaggaggcagaggttgcagtgagtcgagatcgtgtcactacactccagtctgggtgacagagtgagactcatctcaagaaaaaacaaacaaaccaacaaacaaacaaacaaaaacgaaacaaacaaacaaacaaaaagatttgattctccttaggtaagatatttgaaagggccttttccaagtctttcattgtttgagctgttgtccaatagtaggattcagggtaaattacttgcgagtttaaatcatactggcagcttgtcttgccttcagggctcaagtagaagatctttgtcatgacacacacttttttagtgtaaccaccaatttttgccagcttctgttttaaagtttgggcagtttgtgtagaatagtctttaaactcctcatcctgtaccatgtggaaggtgtataggactggaggcttgtcctgggaaatcagaagagcatcacagaggactttgtggttctcttgcaagcccagatccaaagaccagctcctagagaagatcagtgagcccttattgacagagcccatttcttcacatattaattgcttaagtccttcatgttgtgagaacagatttctgcagaaggtttttggagcacaagttatcttttctgatagccctagatggggaaataatgataaattataaaagactgagaacttccaacttaagccatggatacaaagcagcttgtattagattaattctcccaccaaaagcaactataaaagctatgtaaaagtgtatcagggccaggcatggtggctcacacctgtaataacaacactttgggaggcagaggcaggaggatcacttgtgcccaggtgttcaagaccagtctaggcaacactgtaagacctcttctctacaaaaaggttacaaagttagccaagcatggtagtgcatgctggtagtcccagctacttgggaggctgaggtgggaggatcacttgagcccaggaagttgaggctgcagtgagctgagatcatgccactgcactccagcctgggcaacagcatgagattctgtctcaaaaaaattctacatatatatatatttttttaaatttatatatatgtatatatatatatcataaaactataatttaaaggactggagagcaaccaatacaagcaggacttaaagggctacaatctttaatacagaagaatcacaggaagtagcttcacattcacctctgctttttccctaaggagattttccatatcacagcatgggtaaatagagcccatgcagaaatcagcagttttactgggctaaagaaaacagaggtcagacttcagggctgccagaggagctgggatttcagaaacaaaatcccagagaagatgaaactgaagagaagaagccaaaatctacccacaaatttccctcaactcactggctaatacaggtgagatgctagaaacacagaagaaaatatcaactagggctgggtgtggtggcttatgcctgtaatcccagcagtttaggaggccgaggcaggtggattgcttgagcccaggagtttgagaccagcctgggcaatatggtgaaaccctgtcacaaaaagaaagaaaagaaagcaaggaaggaaggaaggaaggaaggaaggaaggaaggaaggaaggaaggaaggaaggaaggaaggaaagaaggaaggaaggagaaaatatcaactgatcaactgggagattaaagagctgaacatcactttcatcagcctcacggtgctcaggaaacacaaattgtaattcaactcccagccaagtagaagggtcttggtaaataccccagactttaagaccccagaagagccatgacctagtaattagtgcaaaattaaaagctactatacctagaaaagcataaaacaaaacttcaaaagagtaaaagttatcactggtgttctgtctgccaaaaaaaaaaaaaatgtgtaaccctatctgaagaaatgtaacatctactaaagtctctacaatttgtaatccataatactatacaaaattaagagacaggataaaaatcagaacaaattactagaaaataagagaaaaactggattatagaaaaagactggcaagtgcttcagacattggagtcatcaaagagggactttaaaataactgttacatcttttttaaaaccccccaaaaataaaataggtgaaaagatgaagatgtcctgatcctcttacaggctcagaaaattgaaatcaatggataaaaatcatcaggggtttggtggtcttaagccccagtttgttcaagggtcagttgtatgcagtaatatcccagaggtggcgatcagcaggtgaaactgagttttcagtaactggatctaggaaaagtggttatccacatgggataaaatgaaatagccccctacatcaccgtttatggatgtggattacatatttaaatgttaaatgttaagtgcaaaactttaaaatttttaaaagaaaataaacagaaatatctttataaccccggggtagggaaggatctcttacacaaggcacaaagagcactaaaccacaaaatttttaaatggcaagtttgactatatccaatttaaaactgctagggagaatatgccttgggaaaagagaaaatgcaagtcatgaacttggagaagacgtctgaaatctgtactatctgtgactaaacgaggattttatgttagaatctgtgaattgctcctagaaatcagtaagaaaaagataaagcctattacaaaaatgagcaaaagacagaatcgccacttcatagaagataaaatatcttctatgggagatattttcttccatgtatatacccaaataaataccgatttgactgaggaagaaaagaagttcaagagaaaagaagttcaagtagaaagatgaagagagaagtctggcattggaaaagatgtggcatttccaatatattgctggtggaagtaaagtgagctatctactttggaaataatttgacattatcttattacttaaatattcacacactgcctgaacgaacaattctacccctacttaggcacctaaagaaatagaatttgacaaattcaatgactaaaaacaccaaagaatttccataaacaaaagaatgtgcttccataacaaatatcaagacagagctggtttgaagagaaggaggtttgaacacagttacaccaacaactccacggaagccagaattaaattacctggaaggtgatatctcagtggctgaattttgaagttaatatattcacgaagaggataactctgggagacaggtgatgatgtacttgctggagagggcagttcctcacatactatggaataatgttagaaaacaaaaatcacgctcttaatttggcatgggagagactcaagctaactaatgcacagtataccaaacgtctacttagaactgatcctgcattcccaatacagaacattagatattgtggttacatattgtggttagattcctaggtcagatacaaattgtaaaattaactcttgatgctgctgaaacactctatacttggaaggaaaattaacagtaaaaatgcattgatagcaatttaatacattgccatataactgagtttattttaaaacaagttaaaattagaagaatgtgatggctagtgaaggaaaactgggttttatgcagattctgaggaacaagtttgcattttcagagattttgtaagttgctagttctggtctaatctcactggaggctttccttttccaaaaccagataaaatatcagcattattcttctcttattggtacaatttaggttactctttggctcataaatgtgagaggaagaggggaagtctttacaggaaataaatggaaagtgggtaaagaaagatgaaagagcaagcaagtaaaagagtaagtgttcccaaaagaaagcaatggttagttacagaaaatgagccctgaaagaaaaacgaaaagaattgaacaggctttccttgaaagtgagtaaagaaatggtagagaagaaacatctagaatctttgcatcagataaggctactaagagtagatatttagttattgtatggaatatctatcttctaagtgtgcagaagaaaacaagaggcagggaagtattggttgtatccaccagagatgttgaaatttgaagacttttaatcttgtccctaatcccaaagatacaataaaaccttcctgccacccaagccaaaggtatccttattgccaatcctccttcctcaacctggttctgaatccaccatgaactggatccattccttctcggtcaactgcttaactctgttatctttcacgtgccaggaatcaggctttttagcaaacactgcacagcagaagcgttccactctgagtgcatacacatatccacaaagccttcctttatcatatactccaaggaatttgcataagtaatttatcgtccccttctccacacagaagtgatgcacaggcagtttcccaatggaattttttgttacttcttctaacttagtaagataactcttctctgctttaaagccaattacttctttatcttcatttagaccaacgaataaatatcctccatcagtatttgcaaatgcagaaacatattgagggagaatctctgtaattcgttgtaacaacttttcagtcgagaagttttttatttcaacgtgtgtggattcagtaaaggtcaatttttctttataaccaagttctgttctgttaaaaaaatcagcagccaaggcttccatgttactttcttcttgtacatcaacacaggccctttttgcagggaattctggtcttaaatatgctctccctccagttttttccatgtctttgaggaactccagtgcagcagaagcattcatgacttttgcagacgttacatctctcttgtacaaactggagctcaacgtggcaatctgcggaccagaggtttccaagctccatgatttcacaaaaatgtgaaagtagttaccattctgcatgaagtccaggaaattaggaacaaatggcagcatgttactaaaagaattttccaaatctagccctattccatcttttttataactatagcctttattctcaacttcagccttgatcactccccctccagaattcagcagagcacacacagctcgtgagacattttcattctgctgttttctcagttgacaatccttcattttttttctattgttctctccaagagtgactcttcccacatttagaaccagctcagcatagtttgtgtctaaatcaatactgatgttcattttcccagcagctaagccatttccacgcagaaattcttttctgtaaaatagagccgttagaataggagttaagcctgagagacagcaaattctgcattatgaggcaaacgtagaaaaatcctttactgtatattttccactagactggtaagtatatgggtctgagataactaatttctaacaaattttgagctaaggctgtgataatttatactcctactgaattttcaaatttgttacaactgttttatacgatcttattctaataattttaatcttgtctttatgtgttcgttgtgtcctttctcatcactaatattgtacaatttgttttctctcttctttctttaagtaaatccctggagggattctatgtttttattttctcagtggacaaggttttagtcatgcatattatttcttctttactttttattttaataattttagcttttacattcattaattatctccttttatgggaaatccttttggaaaactgccagatagggtctaagagggtccagcaataataatcttaattattttttattcttataagaatgaattagattcacaaattttgggcattgatcgcaagcaaaacagaccaactccttgtgccctttccctatcaaacatccacgtttacaaggaggtaatcgtgggtggcaagccacccaggtgccaaggcaagagactgagggcacaagctcttccagtataataaagaaaatatatagaataagaatagttatactaaaaatagattatagatatgattatatatgattatcattaatcattagtttgtggtattattattccaatattataataatctttgttctacaattataacctagaaaaaaaccaggccatacagagataggagctgaagggacatgatgaaaagtgaccagaaaacaagtgtgagccctttgttacgcccggacagggcttctagagggctgcctggcctagcggtaacaccagcgccagggaaggcacccgtcacctagcagaccttggtctaacagtagcatcagtgcctggggaaggcacctgttacttagcagaccgggaaggggagtctccctttccccgggggagttagagaagactctgctccaccacctcttgtggaaggcctgacatcagtcaggcctgcccgcagccatctggaggcctaaccgtctccctgtgatgctgtgcttcagtggtcatgctcctggtccactttcatgttccaccctgtacacctgggtctgccttctagatagcagtagcagaaatagtgaaagtactaaaagtctttgaaatgcgtagaagaaataatggcataagccgtgctctctgtctccatcttggctgccaaacagggaagggccccctgtccagtggacacatgacccaagtgaccttacctatcactggagatggctcacactccttaccctgccccgttgtcttgtatccaatcaataacagcgcagcctggcattcggggccactaccaggctccgcaccttggtggtagtggccccccagcccagctgtttttcttatatctctttgtcctgtgtctttatttctacaatctctcgtctccgcacacgaggagaaaaacccacagaccctgtagggctggaccccacagataatattggtttttttgtttgtttgttttgttgtttgttttttgtttttgtttttgtttttgagatggagtttcgctcttgttgcccaggctggagtgcaatggcacaatctcaggtcactgcaacctccacctcctgagttcaagggattctcctgcctcagcctcccaagtagctggcattaaggcacctgccaccatgcctgcctaatttttttgtatttttagtagagacagcgtttcaccatgttggccaggctggtctcgatgatgatcctgacctcagatgatccacctgccttggcctcccaaagttttgggattacaggcatgagccacaatgcccagtcaaggtaatattcttatatacaaaacacctgtgctctaccttgaatgtttgcatcctctcaaaattcatatgttgaaattctaacacccaacatgatgggcgtttgggaggtgattaggttaaagggtagatccctcatgaatgagattagtgctcttctaaaagggacttcagaaagctagggatggcagcctgccatcacaaaggctgcagcagggaggggcagctagggctgcacactttctggagcccgtgggagccctgcctcttccaagttgggacgtgagctccccaggtgctgctgcagccacccaaaccaccactgtagacccaggcctcccgctctctgcagcatgctagaatcctgccccacaaccctgccccatgcagctgcagccacccaaatcgagattgcagattcaggcatctctgcactcttggggcctgagaagatccccctgccctcgcaggctcagaagtgcctgctcccactgcctggcttctccttctccctgctgtcggtgcccactctgatctgggagcaaaggctggccaaactccggagacataaatggcagtgggaggcagacagattcctgggtcaaaggcggcgggtccccagtagggccacaccttcaggcctgggagggcctgaaggctggggaccgggctgccagtgctgtagactgtggggacttgtggtgcctcttctggggctgcatgtggaccaatggcacacacttcctcccctctgaggtccataaaagccctgggctcagccagagcaggggcagaggaggaagagatgaagagaggaccaacttcagagaggaactaccctctctgctgatagcaggagaggacaggacaaccagccgcagagtggaactaccctctctgctgagcgcttcagagacctgaagagacattggctgcagagagaagcaacggtccccagggcctcctctctgctgagagcagcaaacgtaggaaggaccagtagcagatagaagctaccctccccagggcctcccctctgctgagagctgaacattccatgggatgacctgcctacagagaggagttactcactgcaggtctcctctgagctgtcctaacatttaataaagctcatcttcgtcttgttcacccttcacttgtctgcatacctcattcttcctggacacaggacaagaactctggcaaaggtgccgccagccacagaggtttctggccagaaaatcaacaccctgaagatcctgtaacacaagctcaccccttctgccatatgaaaaacacagaagaagttgacagtctgcaatgggaagaaggtcctcaccagaatccaatgatgctggtatcttgatcttggacttcccaggctccagaactgagtaataaatttctgttatttataagtcacccaatttatggtattttgttgtggcaggccaaacagactaagacagtgtgctttagtctatgtatacataatccattagctcttttcctttaaaatctattgggatcactgttttgctatagacgaaaacctaaagactgtaggtttgtcaagtggcctagagacagttgagagtaaagtccatcataggtagtaatcactacactaggaaagggctataaaggggtcagaatattcctgtccactgctagaccactatcacgcagatactcagctaaggttgtagataccacctttgtctctataaatttctgatcatgtgtaaacaataataaaattgaggccccagatcatttggacaattggggttacatcaagagaattcatatgcaaatcatggtggtgacatacagaggaaaaagaaccgtctattccatataacacttaacaatttacagggaccagagtagatgttcaataaatgacacaactccttgtgcaccagagtagtcaccactccccatgtgatttggggactctgtgcttttgcataggtgtgctctgagactctaatgttttcctccacctttgtcacctgataaactctctatcatccatcccagaactcccatatttgtccttcactctctgctactcccacataactttgtacctatacttggcactaatttcaccatagatctagggaaatatttagaaacaaagcagtgaagtggccagagcagttgttttcaaactgcaggaaatcaagcgaggactcccaatcatttaagacaccagaaggaaaagctttggttcagttcctaccttagacactgaacctcagggggttcaaagcacgttccatgttctggaatgccctccttgaaattatctaaaccatttccagtgccaggtaccaatcagcaccagcagtgtcatcctggcagggtgccccagactggacagaactactagcatccctgttccttccatctgggaaactcaatggcccttcacccaagaaaccctgggacttgtggctgtggggttgtcctaggacctcatggctaggtcctattccaggagaatagcctggcaagtgcattgctctcactatctggagcaggatttctttcacaggatcaagtcagattggattgccaggatggtgctgataatgctgatttgggtttattcaaattgtttatattgacagaggctcacaaaaaaaaaatttactcgggtagaatttattactgaagtcatctggtccatggcctttcttagttgggttttagattactgattccatctccttactagacataggtctattcagattttctgttttttcctgactcagtgttggtaggtgatgtgtttctaggaatttgtccatttcatctaggttatttgatttgttggcatacaattttttacagtacactcttataatccttttgatttctataaaatcaatagtaatgtctcttctttcttttttgattttagttgagttttttctttcatcaatctagctaaaggtttgtcaatcttgatcttttcaaaaaaccaactctttatttttcattaattttttcctacatattttgactttttagtatagtcattttgactagatgagatggtatttcattgtgatttcgctttgcagctctctgatgattagtgatgttgaccttttaaatgtttgtgagcagcttgcatgttttcttttgagaagtttctgttcatgccctttgcacattttttaaatggagttgtttgtttttttcttgattcatttaagttctttataaagtctggatattagtcttttgttggatgcatgacttgcaaacattttctcccattctctaggttgtctgtttactctgttgagacttttgctgtgcagacgctgtttagttaagtcccatttgtctatctttgattttgtggcatttgcttttgagatctttataataatttatttgcccagggcaatgtctagaagagtatatcctagattttcttctagaacttttatagttcgtggtcttacatttcagtcttaattttgagttaatttttgtatatggtgagagacagggatccagtttcattcttctgcatatggttagctatttattgaatagggtgtcctttctccattggttattttggtggactttatcaaagatgagttggttgtaggtgtgaagctttatttcaggggtctttattctgttccattggtctacgtgtctatttttgtatcagtactatgttttggttactgtagccttgaagtatagcttgaaatgcagtaatgtggtgtaaggctccctatcctgttttgttctttttgtttaggattgccttggctattcaggctcttttttggttgcatacaaattttaaatcattttttctaattctgtgaaaaatgacattggtaatttcataggaatagcattgaatctgtagattgttttggggagtgtgaacattttaatgatactgattcttccaacacatgagcatggagtgcttttgcatttgtttgtgtcgtctatgatttctttcagcagtgtttcatagttctcctcgtaaagttctttcacctccttgattagcccctgctctccaattcttcttgcagcctctgtaactggagtcctgtcccctttcctcccagcccaacttcctgcactgtctgtatcaggccttgccctggatgaacccttttggctcacccaccatacacagaaggtgacagaaatcacatctcaccctcagattgcttaaggagggtacgcataccactgggaaacttggaacccatgggagctgcagttgagccaccttatagaggaccgagcacttgtggactagcctgggatcctggccacccgagtccaacacctgcagccatgtaaaactttccatggttcaaaacctcaggcttcaggcatacatctggaacacaatgctaaaattaaataaataaataaataaaaacgagctgaggactgagccgaccaaatctctagggcctaaaactcactggcctcccttaaaccttgggtctaggtttacaggttagatgtttccactgaaatcctttatacttttgactataggggaaattctatcagacctgaactcatgatttaggctatgttgttggctatctttaatgggaatgggggtggcattcatatctccttagagttatgccagaacaacaggttagtaagaactgcaacccacaagggtgggacaggaggcagaagagctacctcctggggagcaaaaagcatagagcgtgatttgccgtcttcggataccactttgcatttagttcggaacagcactgctttcaccctttccctcttctagatgataaaccagcagcgcaagagggtgcttggtttttctttcaggatctagggcgcagttcgtcagtgcctggtcacatttcacctaaataacccattccccaactccctgaatgctcaggactccaggagggtgggcaacccccatccgatggacacctgccaagtctggcctgtccatacagcactccccacttctccagctctgcaccaacacctcacgggcttgagccaccgcgcccggccgccctgcggctttttaaggcgctccccagcccacgcacgggcggaagttttgtcatctacagctttcaagtcctccattgctaagtctacaacagcctgcggttttgacagacattgctacagagacaggagccaactttcccagaagggagagaaagcagcctcgggtctccccgagatcggtggggttgctctggcagcgccccacctcgtcccggagcccacggaccaccccccccggacccccggaataagaaacggaggctggaaggtttggcagtggagcgggacgaatttatctgccagcaattccctggaaacaggattccttgcaggcgctgtgccagcgcgggcccttaagcaactgaaagttaaacgcccacgtgaatagctctgagggatcacggagaagttctcgtttcgtctgtacctatttgtattttctaaggcgaaaaaaaagttatttaaagaaaaagagaacgaacctggcgaggtccatgtctgcgcactcttcaccaagtagggggacctgagttcttttccactttcctgctctccgcgtccgtgtgcggctagcccctcgctcagctgcatttctatcgggcactcgactccccggaagtggtggcaccgcacgcgctgttatcgactctgcgcctttggaaacggtgtgtctgcgaatccaacgacgggcgcggtgactcacgcctgtaatcccagcactttgggaggctgaggagggtggatcaccagcttaggagatagagaccatcctggctaacatggtgaaaacccgtctctactaaaaatacaaaaaaattagccgggcatggtagcgggcgcctgtagtcccagctactcgggaggctgaggcaggagaatggcgtgaaccccggaggcgcagcttgcagtgagccgagatcgtgccactacgctccagcctgggcgacagagcaagactccgtctcaaaaaaaaattgacgaaggaccaaacccctaaaggggtgacattccagcttgactcgtatcccagagcagccctgctgtccccttgcttgaaagcgcagttgacgccagaaaccgggggagagcagctactaatgcacaggggaggagggaggtgcgaggagcgggttgctctcagagagacagagttgaacaactaccccttgcggtgtaggaagtatcttgcggccttctaggccaattagttggcttcgaacagtccagtggctcctctaactggatacagccctcctgtcacgttgctttcgtggggcccttgttatggtaattacgataatacacgtttctccagcccacacgtctaagaactgttgcgagaacccatactttttgaaatgcacacaggccaaaatgactcactaactgaggagttcaccagtctgaattgccctttctccctagctccatcccactccggactcaattaagggcctgccgttggaagtcccatctagaatcttaaggtacaggcagagtacttcttcacactgaatgagcacatgcattgaaagtatatagctggccgggcgcggtggctcaggactgtaatcccagcactttgggaggcagaggcgggcggatcacctgaggtcaggagtttgagaccagcctggccaacatgaagaaatcccgtctctactaaaaatacaaaaattagccgggcgtggtggcacgcgcctgtaatcccagctactcgggaggctgaggcaatagagtctcttgaaccggggaggcggaagttgcagtgagcccagatcccgccactgcactccagcctaggcgacagagcgagactttgcctcaaaaacaaaacaaaacaaaagtacatagccgtgcttttcttcatttcatctgattctcacgccagctctaaggaaacagcttcactgaagtgaggaaactcttcttcagtcactgacttacaaaatggtagtgcagggattttcccagaccaccaagaaggcatccaagaagtaagcaaaaaagattacgacgtcgttcctataccgtggcagtggctcacgcctattatcccagcactttgagcggaggagacaggaaggtcgcttgaccccaggacttcaggactagcctggcaatataaggagacgtcatctctacaaataattttttaaaataaccgggcgtggtggcagtgcacttgtggtcccagctactaaggaggctatggtgggaggatcacttgaacttgggctgttgaggctgcagtgagccgtgatcaggctactgcactccagcctgagcgacagagtgaaaccctgtccgtatatatatgtacatatatatatgtaaaatgaatgcagcaatataccccccaaaattatattaagaccaacagaggtttactctcggtatccaagagtgatttagatgtgaaaatcaatcggcctattcactgcattaatgaaaaaaggaacatcacatgatcatttcaatagataccgaaaaagcatttgactcttgaaagttatcctcagaaagaatacatatgacgtctgcacttattccatagatcaaaacaagtcaccttgccaagcctaatatcaatggggcagaaaactgtcatctacttccggagaggaacaccaaccttgtggaatattatgacagtttatacagcacagcatcttatgctccaagtgggacaaaaatcccacaaccagtcatgatttttaaaaagaacccttagcaaattgggaatagaaagaaatatccgacatccagatcctcaccacgaacacttccaccacctcctgttccctctccctccaaagcggcgccgtagccaccggccccctcctccccagtgccccaggcgcggagcagaccgccggcaacctcctctacaccacgccgcagggaccctccagcagagccgggctgctgcagccaccagcgctgggacgaggcggcagtggccctctggcaaagtgaagtctggagctaggagaaagcggtcatcagtacctctcggatggttcaaaaacccccaagggcaaaggaagagctgcactaagaagtccagatactccaaaaactccaaaatctacctcagaaaaaacacggtacgatagtctcttgatctgctcaccaagaagttcattcagctcctgaaccagtcacccgatggggtcttggttttgaacaaggcagcggaagtgctaaaagtgcaaaatagaaggatttatgatatcaccaaagctctgaaaggcatccatctcattaagaagaagtctaaaaataacgtccagtggatgggttgcagtctgtctgcggatgggggcatgctgacccagtgtcaaggcctgtcaaaagaaatgaccaagctcactcaggaagagaagaaattagatgaactgatcccaagctgcacgctggacctcaaactattaaccgaggattcagatcgtcaaaggttagcttacgttacatatcaacatattcgaaaaattagtggccttaaagaccaaactgttatagttgtgaaagcccctccagaaataagacttgagtgcctgactcaataagagagcctacaaatacatttggcaggtacccaagggcacattgaggtttacttatgtccagaagagactgaaacacagtccaatgacaacaaacaaccaagaccccaatgggaatatccttaaacccacctcgttggtttcaaccaactcaggacatagcgattgctcaatttctatgggaaacctttctcctccggcctccccagccaacctcttacagcagactgcggaccaaattccttctaatcctctagtatgaccatttgtgaacttactgcctcccctgctgcaagatgaccatttgtgaacttactgcctcccctgctgctcctcctgagcctcggggaggaggaaggcatcagcgatctctttgatgcctatgatttggaaaagctcccactggtggaagacttcaagtgtagttgattatgcttcatgtgaactctccttaaaaaccaatttttttaaatcatggaaccagaacatatgtcatgcaatgttgtcccttcctactttcttcctccaggagagtatcatgaagtaaactacaaacttcagaagaaagctgacattttcatgaattttttaaaaattaataaacaaattgtctaaacgcacagttgcaggctcccttgggaaagccctgctttgctacaggctccaagatctcctggctaggtcagcaagtgagaaaatgtacaatcagttgtctctcaccccgacttttccttcctccttcctccccggattggcttgctgtgcctgagggatgggctgcagaatggggtctggccacctggcctgctgggaaacagcaatcttccttaatagcatttcaagccatgccttctccacagaatgcatgtctttgaggtctgctgatatggaatggaactgcagcaaatgcaaacttgaagtcatgcaaaagtatgaaatgaatttcttcagctcttcttaggaatattcaaattactgtcataattcagtttaagctatgaactgtgtgtcccagtaggaggtcaagaagatctccacaggcttctggatgaagaacctgttttcaaatatacttgttgcagatacagaagactagtagagttctgccactctaagctgttgtggattttcctgtctccatgaaccactcccattcccctgtccccaatgtgtttgtgagtttctagttgatttgtagcaaatgcctacttagttctttgtggattgttttgaactttttatttttttagctgccatttaagcattcctgtggcacccatcaccatttcaatttaattgtttactttgaagcgatttttgcaaattcacattacttcagcagagggagagaacctctactgatcagagcatctaaacctgtgtgatctaaggtttatcagcttctgcaaggagctttgtcccaccatgcttccattcccagaaggaggagcttggagcgagtcagtcctggggcttgctgacatgggtgacccattggaaaggagaaccaggttgggtgacttagccccaaggagcagcaggcatgggtccctccatccttgggcttcctgggcccctgtgatgggggaaagggctctcttataccacactcaaggagaccacttctcaggatggagtcagatggagagacctctcgggagaaagacatccccgttgtgtgagtggcatttccttaagctggcaggaacggggagctcccactgtgttgggggctggaatagttctggccagaccccgttccccttcctctatgaaggaataagttggaccaagggaagttgggggcgtagaaaatgaagcaaaacaattccagggtgtctcccgctttactcttcaggaatggtgtcccaagttggaggttttgtgtcagctgcaaatcctaccagttatgtccaagaatggctttccctcgggcaggtggcagtggtcatctcccactgggaatatggcgtagtatctccggtccattccttggatgctaaggactgtgggaatgagggggtcagataaagaacaaacctcaaaacaaacaattaaattgaaatgttatgtgcctgacccaatggtaggcacatagtaggcactcaactcatatgtttaattgaattgaaaatatcccttaggggaaaaaaaaaacacacacacacacaagcaaaaaaccacaagagcctcagccagtttactccaggtagatttccacaatatgcaaagtggtggtggggtcaagacaggtgacaccagcactttaaattctttgtgtgggtatgcgtgggtgtatgtttgggaagaaaaacgaaggtgcagactatcttccttttttcttcttcaacctccatccctggcttcctcccctcacacacactggacttggtacaaaatgtcagtgtggtcctagaggaagcattggggtgggggagggagagggagctttgtgtaaagtgcctactggaaatgcactgtggggtttttcctgtatgggaaaccatttatgccaagctttcccctatttcccaaatttatatcatctggttagctgcctctgcttccagctttgtataattctctttgccagctgcacaaagctgattttctccaaagtctaaagactgagctcacctggctagattgttgtgtgttttgttgaaattgttcataatgtaatgccgtatttattgttttaaaaatgaaaggaatactaataagtcttaaaagttccttcatgcctaagattttttccagttactgggcttaactggtgtacattaattagatgtccatactgtattttgtttgcatcaagtaattttctttttgacttagtatctggcacacaaagtgggttagtactacagtatttgcattactttaagtacaaagttaggtatgtgcttatatgtacagagttgtgcatagcaatcattttatgtaagttgacatgtagtctactcacattttcatttttagcagttttgtacaaaaatagcaattaatttgtaaacactaccagaatactttctagatggcatgtaattttttaagagtgttattttgtttttgtttttgttcttagttgtggttcttcttttcatttttgttgtacgtgtagatctgtaaataaaattgcagtattcaaagcttaagctttcgggaaaaagaaaataagaattcagtgtgtgcatgacaactcgtgtgtatgagaaggagggatttgaaggaagatgacttgcagagtaagtcgggtagcagttgtcagagtgtgggaatttattttcctacggggtacgtgattttgtaaaaaggaagtatttctcccaaaattgggagtaggcaaattactaatcggtttagctttgtgttgtatgctagtttaaaaaagaaaatatgtaatataatgtaaaaaaaaaacaacaaaaaagcttttatgatggattttgtaaacagatttgttacagggtgacctgttctctagctgtgatcttaccacttcaaatgggtgtaatttgaataacttttgtatggtaaaggatcaataaaatgattttttaagaaaaaaagaaatatccttaatctgttaaagattatttataaaataaaaacttttaaaaaatcacactcagtgaggaaatattaaaaactgtcccatgagttttaggaatgaggcaaggatactctttactttcactcccattgcagcttgtgctggaggccttgggcactgcactaaggcacacagagctgaagaaccctgaaaaacaataaatctctaatacgacagcaatgtgccagggcacacaaatagaccagcagaccaatgggacagcagagaggatccagaagcaggcaatatatagtcagctgatttagaatgcaggaagggagcaagctggagcaggggagggaggggcttctgtggtgggaggactggttcagggccaggactggggtgaggagagtgacgcagggccaggcaaaggcagagttggatcctgtctttatttaacatttttatgttttatttatcaccgatttttgcgttaattttattaatttatttattttatttatttatttatttatttatttatttattgagacagggtctccctttgtcacccaggctggagtgcagtggctggatctctgctcaaggcaacctccaccacccaggctcagatgatcctgagccactggagtagctggaactacaggggcgccccaccacactggctcatttttgtttgttttctgtagagagggggttttgctatgttgcccaggttggtctcaaactcctaggctcatgcaatctgcccgccttggcctcccaaagtgatgggattataggcatgagccaccacgcctggccgcattaatttcgattttttaaatattgtttatcttgttcactgagaggtgatgtttgtttggtgtccccttcaattttggactagcaagtgcttcactctccttaaacagccctccccataggttcattgtcttaagtgccgtgatggtttcaagggtttctaggtaggtcaatttccttcatattatacactttaaatacgtacagtttcatgtatgtcgattatagctcagtatagctatttttacagtaacatataaagcaatagagtgaaggctctgtgcactggcggcagccgtggtctccggcccagtttgtggcatctccaggacacaggccaaaacaatcccccagggcaacggccttggacctgagactcctgctgcaggtgtccctgctccccgcgccttctttggctctccccggggtgggttgcggcgctcagaagcttcggcccgcgcccacctccctaccccaccccacccccaccagtccgattctgctcgcgagccgcagagattggtgcccactcgacccttttcggggcaggcaaggattagaccgggatctgacaccaactggcgctgtccttcgcgcccactaacaactggtcagggtgaggacccccagacccactgggatgagggcagaatctgaagcgtgcagggtgagcgacagaagctggagaaagccgatttgaaacacacacacacacacacacacacacacacacacacacacacacacaacaaaacgccaagacgtgccagtgtctacagcgccttcgggggcatttaaattccccaccaggaaaccgagaccgatgctgaggtctcgcctattcctgggtgctcagtgaggtcgtccccacccccggaacggctgtcacagcaagcaggagagcagccctgggaactaaggacgtgaccagttaccagggaaacatcctggagacaccacctgtggtcatccctggggaatgaggttcagaactattcctcagtccaggcacggtggctcacgcctgtaatcccgacactttgggaggccgaaatgggcgaatcttatgagcccaggaaatcaaggctacatcagccgtgatcgcgccactgcactccaactttggcgacaagagtgagacccactcaaaaaaaaatagatttcttaaatgttaattatgaaatatttcagacgtacaaaaaagtgtaccaccaccagcgcatccactaccaccttagagaatgaagccccgcgtttcctcctggacaagtttccctccctccctacccttccttcttccgacttcccccctccccaccgtccctccggcccctcctttcccttccctcccctcccctcatgacctcgactcccttcccttctccctggaaggagcggggcggaagatcgagccccagcgctgccccacaaccaggctggatttaaagcctgtgcagtaggcgtctgtcttcgcggtggcagcattttcctgtcctccccaggactgggagagtgcagcgctcctctttccctttgcaggtgtatgaaagcgagatcgccttctcagccttctctttgcgcctccccagaccctcagctctccagtgattcttatggctttgtgcagggagcgggtcacccattcagcaaaaagtcaccaagggcccaaaacgttttgccagagaaataggatggctgaaaatgttaccctaatggtacaaatggaataactctgtaggcgcacataattacctgtgttttcccagggcatcaaaagccactgtaggctgggcacggtggctcacgcctgtaatcccaacaatttgggaggccaaagcgggaggattgcttgagcctaggcagcctgggcaacaaagctagactcctgtctctacaaaaaacaaaactagaccgagcgcagtggctcacgcctgtaatctcagcactttgggaggccgaagcgggcggatcaccttaggtcaggagttccagaccagcctggccaacatagcgaaacctagtctgtaccaaaaatacaaacattagctgggcgtggtggcacacacctataatcccagctactggggaggctgaggcaggagaatcgcttgaacccgggaggcggaggttgcagtgagccgagatcgtatcactgcactccagcctgggcgacaagagcaaaactccatctaaaaaataataataaataaaataaatataaaaataaaaaataattttttaaaaaagcaaaaaacaaaacaatgagccacctaggcttagtagcactgtctgtagtcctagctactcaggaggctgggcagggaagactgcatgctaatattcatttccattataacccaatttagtggaaggccacgtttacattctcatactgttctatttagtgcaatgaatacactcatctgacttggtaataaaatgtagttattttagaagttccaaagcaatccgacagtcttgaaaacgccttctttgcattttcaaagaaaatgtttatttcacaccagggagaatcagggagaagattcaaaagcattgtgtaaaccttgaattcatgaaacaattttaacaaagggtacaacttcagaagcattaaatttgattgtcttgtatttttgttactaaataatactaaaaccctctcaatcttcgtgaaaagtcttagtaaggaaaggattcttgggccaggcgaagtggctcatgcctgtaatcccagcactttgggaggccaaggtggaaagatcgcttgagccaggagtttgagaccagcctgtacaacatagcgagaccctggctctaaaaaataataataattaaaataaagagtcacagagcggccgcccagagcggcggcgagggcggcggggcgcggggctccaggacacagctgagccggcggtcagagcgagacctgcagcagagacgacggaggcggaagcatctcgatccgggaggcggcggcgtggggagccggggccgcctgggatgttcagtcatgaaatgagtgcgtaccgaggagatccagatggcagtgtcctgctacctcaaacgctggcagtacgtggactcagacggtcccctgaagcaaggactgcggctgccacagactgctgaagagttggcggccaatctcacggtacacagagaatctcattgtgccgacatagtgtctgcagtcccttgccaggcagagccccagcaatatgaagtacagtttggacgactgcggaattttctcatcgattctgattccccgcatagccacgaagtgatgcctctcctttatcctctctttgtctgcctccatctcagcctggtccagaacagtccaaaaagtacagtggaaagtttttacagccgcttccatggaatgtttctgcagaaagctagccagaagggcgtcattgagcagctacagaccactcaaaccatccaggacatcctatctaacttcaagcttcgagcattcctagataacaattacgtggtccatctccaagaagacagctacaactaccttatccactacctccaaagtgacagctatactgccctgtgcaaaatgtttatcttacttattcatcttgatgtgcagcctgccaagacaacagactaacagctgtatgcaagtggcagctcctcccgcagtgagaacaattacttggaggcccctgatatgcccagccctattctgcagaacgatgctgccctggaggtcttacaggagcgcattaagcaagtcaaggatgggtgtccctccctcactaccgtctgcttctataacacctagcagctgttgaacactgcagaaatctcccctgatagcaagctgcttgctgctgggtttgacaactcctgtataaaactttggagcttacaatccaggaagttaaaatcagagtcctgtcaagtagacatgtcccgcatccatttggcttgtgatattctggaggaggatgtgtgaataccgttttttcttccctgcacctgccttcctaatttgcttagaatgtccttaccaaacacgacatatcttagaatggacttcctaattttcctcatcatatagctaaagccagactaatgccatgtaacctgtagccattgaattcctgcacatgcctaacctaaggtgtaaaaacaatttttagcaacgtaacttaacattattaatgaatggtagtatttatactatctgaaatgtggataacaaccctaagcctaattaaagacctttagctaataatgactttagctgagatttgcagtaaatatgcacttatgtgtgcgtacatttgctcaggtataaataattagaagtaagattactgagtcaaagggcctgcattgtaaactgtaatgaatattgcttttcccacagaaggttgtgccatttcacagtctcagcagcagtagtgagaacactgctgtccctgcaccctcaccacactggatggtattgcctttctgaggccagtccgtatcctgtggatccatgtaccccagggtgttcccagaccccactttgagaagtaacacaggaagtagagttgctagctctcccctgtcagtcagtgttcaaccttttttggtttgtaaccatttagtcattgaaaagggcaggcgcagcttgggtttcaggtcactgaaaatcactaccttagaaaaaaatgtaggccaaggaagatagaaattaaacttcacagagttaactttccttcagagtgttcctgcgaaagctgtgggccaaaatatttttgtcttatcaccactgaaattcaggtagctctgcctcatgttactttggatggaaaattctttatacgatgttaaaaacttaaggatcaaaaatatcacgctaactaagttacagttaatgataaggatatcaagaatattcggtgtgctaaattaagccattgttttcctgtttctgttttctgagtctgcgtccagttagtatggcctttgaatttttgattactgcaaccgagacagtataattcaaggatttccttatgatgagtaaagagtctgattcctacgtagaagctttaatttctagtattttttttaaactaagggaggagaccacccctcatattgtcttatgccaatttctgcctctaaagaaagaagaagtaaaaactaaaaggcagaaatgaaatccacaggcagatagcctggcgccatgcctcaggcctggttaaagatccacccctgacctggccaggcgcagtggctcacgcctgtaatcccaacactttgggaagccaaggcgggtggatcatgaggtcaggagatctagaccatcctggttaacatggtgaaaccccgtctgtactaaaaacacaaaacattagctgggcatagtggcaagcgcttgtagtctcagatactcaggagactgaggcaggagaatggcatgaacccaggaggcagagcttgcagtgagccaagattgtgcctctgcactccagcctgggtgacagagcgagactctgtctcaaaaaaaaaaaaaagatcgacccctgacctaactggttattttatctatagattccagacattgcatagacaagcactgtgaaaatcccctgtgctgttgtgctccattctgattaccggtgtatgcagctcccagtcatataccccactgcttgctcaatcaatcacgaccctttcacgcagactcccttggagttgtaagcccttaaaagggacaggaattgcttactcggggagctcggtttttggagacgtgagtctgccaatgctcctagctgaataaagcccttccttctacaactcagtgtctgaggggttttgtctgtgtcttgtcctactacattgcttggtattctgaccagaaagcgaggtgattaacagacatggtctaggcagccccttaggcagcttaggcctgctctgtggagcatccctgcaggggactgcagccagcttgagcaacatggatcctgagagcactcctgggtaggcattttccctggtggaatgccttgttagagcagagcatggcagaccccaatggaggatcaatatggtggctgaacaccaggaggaactggcacttggagtccggacatctgaaacttggtaagactggtctttagaccttgcccactccattttagtggaagcatggcctgatcacccacagcgtgcctgtaccggcactttggtttttgtttttgacttgacttggattgcttgatacttcggttttggttttgacctggcttggatttcttgatactctgattttggttttgattctggtttggtgtaaactgtaaaagtgcgtgtgtgccctttttatccgttctttgttttgtggtgtgcatgaggtgtgagtgtggtgttttgtctcaaggaagcatgggtcaggcacaaagtaagcccaccacactaggaaatatgtggaaaaatttcaagaaaagatttaagggagactatggagtactatgacaccaggaaaacttaaaactttgtgtaaggtagactggccagcattagaggtggccatcagaaggaagcctggacaggtcccttgtttcaaaggtatggcacaaggtaacttgtaagccagggcacccagaccagttcccatacatagacacttggttacagctggttttagaccaccccccacagtggttgagagaacagcagcataagcggctggcagaggcaaggaaagaccagcagagagagagaaaggaagagacagagagacaaagagggagtcaagaagagagagagagaaagagaagcagagagagaggaagagacagaggcaaaaggaaagtcaaagagagagagagagacagaaagtcaaagagagagacagagaaatatacaagtagttaagaaaaaaaaagtgtacactattcctttaaaagccaaggtaaatttaaaacctataattgataattaaaggtattctccataagcctataacactccaataccactttgttgtcagtgtaaacaagggggtatcccaaaagcactgaggccttcctatcaaaaatccttagccctgtaacctatggatggcccaaatgcattcaatctgtagtggcaactgctttgctaacagaagaaagtaaaaaataacttttagaggaaacctcattgtgagcacacctcaccagttcagaagtatcctaaggaaaaaaaaaaaaaaaaaaaaaaaaaaacgatgatttaacattaaccactgaaaattcccttaacccagcaggtttcccaacaggggatctaaatcttaattaccatacaaaggtccgaccagacctaggaggaactcccttcaggacaggatgatagatggttcctcccgggcaattgaaggaaaaaaaaaaaagccatctataccaattctaagttagtttggactaaacaaggtcttattaatagcaaaggataattgaaatcccaaacttacaaggttttcaacaaaagtaaagtttactaaaagttaacagtgtaacatgtattatagtaacctgtaatcttgtggccttagacagtctagtccacagacataaaggaagtttgctttggaaaagaacggttatcttcaggaaaaaaaggggggcagaatttatgcaaaaataatgttatatggtaaattcttgtcctgaaataaattaaccggttgtttaaagaaagaaatgtttgtaataagtcagacagctgaggcatgttgaagaattgtctgtgaaagtcgtgaaagagaaaaaaagttataaaaaaaagtgtgttagaaaaagaatttatgcaagaaatgttgtataatttaaaagtaattaggcctcctgaatgtaaaactattgaagagacagttttgtgcaaggtgtataaggaaagtaaagtatacctttggtaaagggattataaggagacataagaatgtggactttttacctacattaaagggttaaaaaaatgttttaaaggtttaagcaagttttcaaatgttagttgtgtgtaaattctgtgtgtaaatatattagctaaagttaaaggggtatcatccagtttttctgagaactggacattaaagtaaaaacacaacaggtttctcttaaagcactaacctgctctttaacaaagattataaaaggttaaaaagagtctataaaaatcttacctaatggtccgacattaaaaattgaataaatatgcctacaaagttttattaaaactaactttaacattaatagcatactaatataaaggtgaaatttagcttatctggtataaaaatcatacaagaagaattgtcaaatataaaatagtgtttggcttctttggtctaaaaactaataaaaaataggtactaaaggaaatttcgtagtagaaaggcaccaaggactataaagtccactgccgatgtccccacatttaaaacaaaaggtcaatttctttaaaaaataattacatacttgctttatcttccactttcctttccctcaaaactaaaagtcttttagcacatgtaccacccctagaatttctggtaaacccgcaccagcctgaagatcatgttctcatcaaagggtggaaagaaaaaaactcgagccagcctgagaaggaccctaccttgtgctgctatccaccgagactgctgttcatacagcagaaaaggaatggactcatcacacccaagccaagaaagcaccaccccctccagagttgtgggccacagtcccaggagaaaaccctacaaaactaaagctaagaaaagtttaactccttcttctattctatcgctctttcttctttcttcactctatttctgaccatctagttattaacataaccaagtcaattttgcctcaaactattgcatttaatgcttgccttgttataccctgtggggacttgccaagtcaaagacagctctctacttcagaaaagtacctctgtccctcctgactctcctcagactgggcattaataaattgggaccatttaatccagggagattttgattaaaaaccccagtgtcaatcaggagtcttgccccccagtagagagtttttatgctgtagttggtccaatgttctgtggaccactaaagagcaaggatggactgccccaaccggtttttgtaatttcctaaaatcatacattcattttactagaggatcatagacgttaaagactgaaaacaaactttggcaattaagcaggatgccaagatgcaaatgcctggttgaaatggatcaaatattctgtccacacataaaacaaaagcaattgttatgcttgtgcacatggcagtccagaggcccagattgtcccctttccactggggtggtcctccagtcgaccaggcatgggctgcatggtagctcttttccaggattctacagcctggagtaatcagtcatgccaagctccctctgctatatcccaaagtccagcaccctgtgggtcagcccccaggggacatccagcttccatctcccaacactaagttcacttcttgtctctcacgacagggaggaaacttagccttctttggagacctgaagggatgcaatgagcttaagaattttcaagagcttatcaatcagtcagcccttgttcatccctgagcagatgtgtggtggtattgtggtggacctttactaggcactgtgcccaataactggagtggtacttgtactttagtccagttggctatccctttcaccctggcatttcatcaaccagagggaggaaaaataagatatcataaagcaagagaagccccttatgggtctttcaactctcacgtctatttagatgcaattgaagtcccatgaggaataccagatcaatttaaagcccaaaatcaaatagctgcaggatttgagtcaatatttcggtgggtgacagttaataaaaatgtagattggataaactacatctgttaaaaccaacagcaacaagcttttcatgagttaaaagaaaaactcatgtcggccccagccctggggctacatgacctgacaaaatctttaacactatatgtgtcagagagaaaaaaaagtggcagatggagttttgacccagactgtggggccctggctgaggcctgcctacctcgtcaaagatctagatggagtttctaagagttggcccctgtgcttaagagccttggcagcaacagctctgctagcacaagaggtggataagctaactcttgggcaaaacctaaacttaaaggccccccacgctatggtgactttcatgaatacatcattggctaacaaatgctagattaaccaagtaccaaagcttgctatgtgaaaatccccgcataaccattgagttttgcaacaccctaaaccctgccaccttgctcccagtatcagaaagcccagttgaacataactgtgtagaggtattggactccgtttattctagtgggaccaatctccaagaccacccttgaacagtagactgtgagcggtacatgaatgggagcagcttcgccaacccctgtaaagtgactctgaagaagacgagaagccctgctccagtcacacccagaagctaactggtccacgcatggctgaagcatgagaaaactcttcatgggactcattttccttaaaatttggacttgtatagtaagtacttcaactgaccttcctcagactgaggactgttcccagtgtatatatcaagtcacagaggtaggacaaaaagttgctacagtcttattttatgcttattgtaagtgtactgggactgtaaaaagaacttgtttgtataatgctattctatacaaggtatgtagcccaggaaatgaccaacctgatgtgtgttatgacccatctgagcctcccatgaccacagttttaaaaataagattaagtactgaggactggtgggggctcataaatgatatgagtaaagtgttagccaaaacagaaggaaagaaaagggattcccaaacaagtcaccttgaaatttgatgcctgtgctgtcattaatagtaataagttagaaacatgatgtggttctcttaattaggaaagaggctgtatggcagaaaataagtacatttgtcatgaattaggactgtgtggaaataaatgtagatactggtcttgtgtcatttaggctatgtggataaaaaataaaaagaatcctgtccaccttcagaaagggaaagtggcccttcctgtaccagtggtcagtgtaaccccttagaactagtaataaccaatccccttgatccttgctgaaaaaatggggagcatgtaaccctagaaattgatggggctggactggatcctcgagtaaatatcgtggtttgaggagaagtttataaatgctctcctgagccagtatttcaaatcttctatgatgaactaaatgtgccagtaccagaaattccaggaaaaacaagaaatttgtttttgcaataagccgagcatgtagcccagtctctcaatgtcacttcatgttatgtatgtggaggaactgtaatgggagatcaatggccatgggaagcccgagaattagtacctacagacccagttcctgataaattcccagctcaaaagactcaccctgataacttctaggtcctaaaagcctcaatcattagacaatactgtatagcaagagtggggaaggacttcacccttcctgtgggaagactcagctgccttgggcaaaaactgtataatagtactacaaaaacagccacctggtggagttcaaaccacactaagaaaaatccatttagttaattcccaaagttgcaaactgtgtggacccacccagagtcccaccaggactggacagcccccactggattatactggatatgtgtgcatagagcttacaccaaattacccggccagtgggcaggtagttgtgttattggcactattaaaccatctttcttcctactgcccataaagacaggtgaactcctgggcttccctgtctatgcttcctgcaaaaagagaagcatagctataggaaattggaaagatgatgaatggccccctgaaagaataatataatattatgggcctgctacttgggcacaagatggctcatagggattccagactcccatttacatactcaaccaaatcatatggttacaagctatcttagaaataatcactaataagactggcagagccttgactattctggcccagcaagaaactcagatgagaaatgctatctatcaaaatagattggctcttgacaacttgctagcagctgaaggaggggtctgtaggaaatttaaccttactaattgctgtctacacatagatgatcagggcaagcagttgaagacatagttagaaatataacaaaattggcacatgtgcccatgcaagtgtggcatggatttgatcctggggccatgtttgaaaaatggttcccagtgctaagaagatttaaaactcttataataggagttataatagtaatagaaacctgcttactgctcccttgtttgctacccatacttcttcaaatgataaaaagcttcatcactaccttagtttaccaaaatgcttcagcacaagtgtactatatgaatcactatcgatctgtcttacaagaagacatgggtagtgagaatgaaagtgagaactcccactaatgagtgagattctcaaagagggggaataagggaggagaccacccctcatattgtcttatgcccaatttctgcctccaaagaagaagaagtaaaaactaaaaggcagaaatgaaatccacaggcagatagcctggtgccgtgccctgggcctggttaaagatcaacccctgacctaatcagttacgttatctatagattccagacattgtatggaaaagcactgtgaaaatccctgtcctgttctgttccgttctgattactggtgcatgcagcccccagtcatgtaccgcctgcttgctcaatcaatcacgaccctttcatgtggacccccttagagctgtaagcccttaaaagggacaggaattgctcactcggggagctcagtttttggagacgtgagtctgctgatgctcccagtggagtaaagctcttccttctacaactcggtgtctgagtggttttgtctgcagctcatcctgctacaagacggtgtctcactctgttgcccaggctggagtgcagtggcacgatctcagctcactgcaatgtccgcctcccaggttcatgccattctcctgcctcagcctcctgagtagctgggactacagacacccgccaccatgctgagccaattatttttgtatttttagtagagacggggtttcaccgtgttagccaggatggtctcaatctcctgacctcgtgatctgcccaccttggcctcccaaagtgctgggactacaggcatgagccactgtgcccagcctaatttctagaattttatagtactctccaaaatatttttattacatttatatttgaattttcaaacttctcttttccttggagacagttctcttttccttggagacagtttttctgataaaactgaggaatattgcctgcattttctttcagttttctgtaaatacaaaaaataatatttatactgaccttattagctttgatgatacagagtttgggattattctgggcattaaaaattaatattaaggaagatagcattatgacatcttgtaacagtagaccaaaataaaacattttaagactctggccactactgaaaactagctctgtgacttgtcctatatatatttctgggtattatctgaagactcaaaagtgaggaacagagtgaggaatcccaggaactgaaagaaattaagtatggctggagttaggagaagggctaagacaggaagtgatgtgatgacagtgtcttatatgagcaattatgacagccaaactaaggtagtgacagtggaaaaggaggcatggatggactagagaagagctcagttattagattactgtaggggatgagggagaggaagcaccaagggtgacgtttgtgtctcaggcttaaacagttggatatccatcaagaaaagagcaaaagatgtcattggaatggtggttttgtttaaatacttctggctttccaccattgttcatattgaaagtactgcagatgctcgccagcctctgccttttttaagaataaactttttttaaactaaagaactaaagctgagattcttctgttctgttgttgaggggcttcctgtgtgggatttctgcatgcccgcccatttagtcacagcaatttgggaagttttctctttggtttctgacaatgagcatttggggggaaagccaggcataaattagttacagtagttggtgtttaatgtttctccagtgaaaatttggacttttattttttccttgtagaacgcataattaaaactcatagtattattttgaaatgaaatattaaatattttaaaaaaagagactcttttttttttttgagacagagtctcgctgtgtcccccaggttggagtgcagtggcgtgatctcagctcactgcaagctccgcctcctgggttcatgccattctcctccctcagcctcccgagtagctgggactacaggtgcctgccaccacgcctggctaattttttgtatttttagtagaaacggggtttcaccgtgttagccaagatggtctcgatctcctgacctcatgatcctcctgtctcagcctcacaaagtgctgggattacaggcgtgagccaccgcgcccggccaaaaaatagagactcttaatggaggagccataaactcacatacctatagaagccaaactggtaaaagcaagtagtggaaccacatggattaatgagatgataggaagtacaaaacagccatgtaagtcaaattaaaaagccagcttccactttctgctttaatcttttcaaagcaataactattacataaatcagtggatacaatatttcagcagtatttgaaatggtgttcatacccagcaattccgcttctagacataaatccaagagaattgaaaacatatgtgcacacaggcacttgtacatgaatattcatggaagcattatccacaacagccaaaaagtggaaacagtccaaatgtctatcgagatgaatgaataaataaaatgtagtgtatgcatgcagtgaaatattatttggccataaaaagaaatgaagcactgatgcaggctgcaacacggatgaacttgaaaactttatgttacgtgaaagaagccagtcataaaaggtcacacgctgttattcctattataggaaatatccagataggcacgtccatagagacagagaggagaggagacgttgccaggggctggacaaggagaatgagagtgagcgctaatggatgttgcatttctttgtgaggtggatagtggtgatcattgcacaactctgtgaatgtactaaaaattattgaattgtacactttgaaagaattaattatatagtatgcaattatatctcagttttaaaaaaaggaaaacagtaaccaaaatctcctatggaagcataaaattttctctgttaattatgccaaataaaactgaattcacagcaaaaaaaaaaaaagaagagaaaggattcctaaattatttaattactactaatatctgacctgaagttactttgaatgtcttgcttcttcatcagcactgaccatagttctagtcagattttcctatttttttaactcaaactgttgagagagagaaatggcgtatattagaaagatgcaatattgtttaaactttactactcttttgtttttacattgattttcatgtttatcttattctattttgactgtaatgtatacatttaactaaagattgtatttctcaattgtaatttttttctagtagaaaacattttaagatgcagagttcttttctttttctccaatccctttaatagtcacttaaacaattaagattgaagcgataataaaactgcatttcttacaagattttgtatgatatttgtagtatataccaattttctcataatctcttctgcaataacatttcattaatactctggtcctcaggttgtttcaacaaggtcagaaagataggcaagaagatggtaaaataaacttactcatgggtaaaaggaatcaaatatttactatgtacactattctaggttttacacactttacataaattaagtgtgacataagttctagttgtctgttaatagaaaagcatcactttgggaggctgacgcaggaggatcccttaagcccaggagttagagaccagcctgggcaagatggtgagacctcgtctctacacacacacacatacacacacacacacacacacacacacagagcccctatagtcctagctactcaggagcaggaggctgaggtggaaggatcccttgagcccaagtatttgacgtggcagtgagctatgattgtgccactgcactccagcctgggcaacaaagcaagacttcatctctaaataaaatgaaacaaaataaaataaataaaaaacataacagcaattccagggccagctaagtctatgttttacatgtgctttcactttaagtacaaattgtggaaacaaacaatgtatccttgcctaaagatacattgtcaacatggcactaatacatattttccacttccaaagttttttttgtaagtgtacaacgttagcacatggaaacattcaagctgtttatcattccactgaaatctgggttttgttatgttttgttttgtttttctgttctcacctgctgagcagcatttggccagcatcaccacagggacttggttctatcacccggtaaagttaagatgggaacagaaagtggcaattgtgtttctgggagagaatttaaaaaagagctgattttttttttttttttttttttgagacggagtctcgctctgtcgcccaggctggagtgcagtggcgtggtctcagctcactgcaagctccgcctcccgggttcacaccattctcctacctcagggacttggttctatcacccggtaaacttaagatgggaacagaaagtggcaattgtgtttctgggagagaatttaaaaaagagctgattttttttttttttttttttttttgaaacggagtctcgctctgtcgcccaggctggagtgcagtggcgtggtctcagctcactgcaagctccgcctcccgggttcacaccattctcctacctcagcctcctgagtagctgggaccacaggcgcccgccaccatgtccggctaatttttttgtatttttagtacagacggggtttcactgtgttagccaggatggcctggatctcctgaccttgtgatccgcctgcctcggcctcccaaagtgccaggattacaggcgtgagccaccgtgcccagccttttttctttaacttaacactgctagctttaaaaggtagtgtgtaattttaaagcactgaagttgtcatttaaataagaaaatgcacttggcttaatcaactgtgaaatgaagacgatatcactgccttttcaggcattagaccaaagccaattattttgagccaagtgataccaagtttatattgcactacagttttcaaggacatagtgtttctaccctctccgaacctaagttgccccctcactcctccagccaacccccctttctctgggcccgttctttcccagctgagctgtttgccccttgctccctttccctcctctatttgccctttgactgtccctctatctatatctgggctagtgcaaaaggtttcttcactgcctggtcagtcactgaccagtcaccactgcactggggtggatttgggatcctattagtaaaactgactatctggtatgtttgtgctggtcatctcccctgaaaatgatattgtgcctcatcatcaaaagtactgtttaagggataaggatggcaaacccacaaggtatctgagaaaatcctcaaatgtgtgagtcacctagtcaaatgttcacttatatatactacaggtaagttcagagatgaactgtgacttgcccgaggctgtgcagctgaccagagggagacactggaactgtatttctctttccactataccataaaaaaaaacaaggttaatgacacttaaaaagagtttgtaagtaaaccaaaatgaaatgcctagtacataggaaaagtctttgggatctccccacagatttttaggcagaatgaaagctatctgtacaatgagaaatgctgctcagttcgacagatgccaccaagtaccaacagatgccaccaagtaccaacagatgccaccaagtatccttactgtcgttctgaaactgagtctgtgactgcagataatatgtcactatttgagaataagaggtcccaccctctccattcttttcaggtcttcagtcacaaggtcacaccttactttcattgtttaacaggataaattaatcaggttgaagtaggacttaggaggtacattgaagataaaagcaaaacgcagcaaacatttttacaagtagatcatcgcggttaccttaaaagttaagtttcagattaatttacagagtagtgacagaatcataatttcagtgaaaatcaacaatagagttgtatcattgaaaaaagataaatttggaaatactaagtcaggcaagcacgcgaaattcagaatattaaaaaaggcaaggcctggttgccaacatacgttcctcagatgaaggtggatatgaagatactaaacagaaccaaatgaccgagaagctgaaagggacactttgcagatcagcaaatggactccgactccctcgttcaatacattgaggaaagtgagctcacaaagcttgattggggtatacataaatctaattcctggtgctgtttgcaactacttatattttaaatgcaaggagataattgcttagaacacattaagctcactgatttaaacaaaacatttcaagactgacacactggaaggtggtaatgttaacacagcacaacagcacacctcgcagatttatgtctaagagattaaatggaatcatcacctcaaaattttaatcctcagttttcacaaacacgatcaagtctctatcaaattttctgatttatagcataatgcactagccgtaaaaatgtgcattcttcagtttctcctacacttttctgcctatctttcaacactgagccctgggtgttttcaacataagcaaggccatatgcacattttaatctcatgttttagaaatgaacaaaatctgtgatatttcagtagctcatagtgtacttaaaaaatgaaaagatctctatcaaaatatgcttttcactgggaaaaataaatgaaccaaatggatttacacaaagtaaacattaactttggtagatttcaatgtagaatagttcataacaagcatatttgcccttctgctcaactaccaagttaagactttttcaagtattttaactgagattttattatgttgacatttgtttctcattccacatcgtctttggccaagcgccagcacttacaagtctctgattaactggtaggggctttgtcagaagcatctggatcactggtagtggaagagtttgttgtaacacttgcagtaaccactgtggctgtccacacacagcacttggatttgtcaggtggtctacacctttagctaggatctcttcaccaaagctatatctcttccaggaagaatttctggacagcttcagcatctttaaggtcagctaacttggaaagctcaactcactcctcggccagcttctgtttctttctttattctggacgcctattctttaagttggggtcacttcagtcttttgcggtcgaagtagatgcagtacccgatgaaaagggccccgaatactccagcggcgatggctccgttccgacccagcctcttccccagaacgctgagtgtggactgcggcggtgggggaaaggagcggttgcccacaaaccatccgagcacagggagccgctcagacccgacgccggcgggacaggcacttggaaagcaagatccagggttctgaagattaaaatcgttagttcatttactatatttgtgcaagtttgagagagagtcatgtgtataggattaccactgagtttatattattttctctatgcctggagagtgtttcttttgttttagtttatttgtttgttttgattttttgcttgtttgtttttgagacctattctcgttctgtcaccccaggttggagtgcagtggcgtgatctcaactcactgccacctgcgcctcccagactcaagccatcctttcgcctcagccttctgcgtagctgggattgcaggagcggccaccacgcccggcaattttttttttttttttttttttttttgagatggagttttgctctttgttgcccaggctggagtgaagtggcacgatcttggctcactgcaacctccatctcccaggttcaagcgattctcctgacccagccgcatgagtaactgggattacaggagcccaccaccacacccggctaatttttgtatttttagaagagacagggtttcactatgttggccaggctggtctcgaactcctgacctcgtgatctacccgcctctgcctcccaaagtgctgagattacaggcgtgagccaccgcaccccgccagtgtttcttaaagagttagcatatttaaagaattggatgttttgggcttaatttcttattttttccctgggattcttagagaccccctctactagatttatataaacacttagtaacatcttcaaactgatcaatataggaccatagaatttgagagacattaatatccttattttctaatatccactgaagatagtttatctttctgaggaaactatttcccttagttgtccttcacatatcactaccacttcacaagaacaaacagtttttgcaactctattacttcagcatcaaaaaggttggggtccctactaggggcatggaatcctctaagattcttcattccattttccagctccccagcatataggaacctcagtgcaccaggcattagttgtcctaaagcaaaacattccatcactttgatcagattaaaactctaaccagttctgcctttccattctggaatacgtgtttaagaaggatagaactatactccttctttttgtagtacaggatttgtcagccttgacactattgagatttgtggctggaaaattgtttgttgtggggggctatcctgtaccttctaggatgttcagcagtatccctggcctctatccaccaggtaccattaacacactcccctcaaggggtgacaaccggaaatatctccagatattatgtcccttggagggcaaaatccaccaccccctccactctattgagagccactggtctagtctaatgatgagcagattaattttaacaatgagcagacctattttaatgatccatataccagtgccatccaacagaaatataatgcaatacataaatgtgattttaatatagtaagcacatttttaaaaggtaaaaataaataagcagctttacttttaataaaatattttattcaactaaatatttccaaaatattatcattttgacacgtaatccatttaaaaatgattcatgtaatttttcattctttgtcatactaagtttttgaatcccagtgtctattttacacttacttgtcatctcaatttgcaccagccacatagcaagcactaattttctacacatggctaatgtgtgccatgggcactgcagtcatatacagtgacatcccgcaaaagccagaatagtcaacataaacaaattaagaaaacaaacaaatagcagtgagggcacagatcttggtttttgccattcttcagtaaaaggaaccagagcttcttggagaaatggctgattttagggctggggcagagaaaaaaaaatcacaagcattcctatacaccaacaacagacaagcacagagccaaatcatgagtgaactcccattcacaattgctacaaagagaataaaatacctaggaatacaacttacaagggacgtgaaggacctcttcaagaactacaaaccactgcttaaggaaataagagaggacacaaataaatggaaaaacattccaagctcatggataggaagaatcaatattgtgaaaatggccatactgcccaaagtaatttatagattcaatgctattcccatcaagctaccagtgactttctttgcagaattagaaaaaactactgtaaatttcatatggaaccaaaaaagagcccatatagccaagacaatcctaagcaaaaagaacaaagctggaggcatcacactacctaacttcaaactatactacaagcctacagtaaccaaaacagcatagcactggtaccaaaacagatacatcaaccaatgaaacagaacagagacctaagaaataacaccacacatctacaaccatctgatcttcgacaaaactgacaaaacaaacaatggggaaaggattccctgtttaataaatcatgctgggaaaactggctagccatatgcagaaaacagaaactgtactccttccttacacctatacaaaaattaactcaagatggattaaagacttaaatgtaaaactcaaaaccataaaaacgctaaaagaaaacctaggcaataccattcaggacataggcatgggcaaagacttcatgactaaaacaaaagcaattgcaacaaaagctaaaattgacaaatgggatctaatcaaactaaagagcttctgcacagcaaaataaactatcatcagggtgaacaggcaacctacagaatgggagaaaatttttgcaatctaccatctgacaaaggtctaatatccaggatctacaaggaacttaaacaaatttacaagagaaaaacaaacaaccctatcaaaaagtgggcaaaggatatgaacagacacttctcaaaagaagacatctatgaccaggtgtggtggcccacgcctgtaatcccagcattttgggatgccgaggtgggtggatcacttgaggtcaggagtttgagaccaccctggccaacacggtgaaaccccatctctacaaaaatacaaaaattagctgggcattgtggcaggtgcctataatcccagctactcgggaagctgagggaggagaattgcttgaagccaggaggcagaggttgcagtaagccgagatcgtgccactgcactccagcctgggagacagagtgagactgtatttaaaaaaaaaaaaaaaaagacatttatgcaccgaacaaacatgaaaaaaagcttaccatcacaggtcattagagaaaagcaaatcaaaaccacaatgagatagcatctcacaccagttagaatgacgattattaaaaagtcagaaaacaacagatgctggagaggatgtggagaaataggaacacttttacattgttggtgggagtgtaaattaattcaaccattgtggaagacagtgtggcaattcctcaaggatctaacaccagaaataccatttaaccaagcaatcccattactgggtatatacccaaaggattataaatcattctactataaagacacatgcacacatatgtttactgcagcactatttacaatagcaaagacttggaaccaacccaaatgcccatcaatgatagactggataaagaaaatgtggcacgtacacactatgcagccataaaaaagaatgagttcatgtcctttgcaaagacgtggatgaagctggaagccatgattctcagcaaactaacacagaaacagaaaaccaaacaccacatgttctcacttatgagtgggagttgaacaataagaacacacggacacacaaaggggaacatcacacactggggcctgtcagagggtaggggggcaaggagagggagagcattaggacaaatacttaatgcatgcacggcttaaaatctagatgacaggttgatgggtgcagcaaactaccatggcacatgtatacctatgtaacaaacctgcacgttctgcacatgtatcccagaacttaaagcaaaataaaataaataaaaaagaaagagcttccaatggctaatactagaacaatttgaggaactaaataatgtaatattgaaatataacccaaaatattaaataaatacctataagttcattcatacaagtaaaagattgaatgaatgagtaaatggagaaaagacaagtctcctatacagaagaattccaaataacttatgtataatagctacatcctctctccccacatcaaggaagtggcacttcaatccccaccctttgagtgtgaactgcacttatgacacctgagggaggaaaagtaaatacggtggatcaacctggcaaacactttctgactcatacagtcaaggttaatatccacatgataagacatgtcgatcgcatacacccctgatatgatatgatgacaattacagttcatccctgtggtcttcctcttgaaaatcttgagtatgaaaaataaaatcctaagccccccaaccactgaacagaccctctcttggccaaggggaccccagaaaaaccttaaaagttgaatttgcaagcataatggaatggcaggtcagccgcacctcattataaccgctctcttttgcagtttagacacaacaactgaccagcactcaggttaaaataaacatcataagaccgatggaacagtctcttcgtggcaataagataccaagttgtaaataggacctaaagccttgacaggcaagaattgagtcacgcgtccctacacttaaagaataaactatgttctaatagccacaagctttttcttttcttctatcagctaaacaaacactggcctggagataagcaatattaaaacaactgcagcgcatccactgccagacatgaaccaactgaccacctgctccaccagccctaactacagctttgactggacaagagactgattttagtaactttcttctgataacaagaccaccaaccatggactgcttctggctggtttcgattctgagcacttgagtgccttcttctcctgaaaagacttttgatgtgtaaggtctaattgtaatagatataaaagttaaaacatatagggtctaattgtaataattataaagtttagtctctactggctgggcacgatggctcatgcctgtaatcccaacactttgggaggccaagacggatggatcacctgaggtcaggagttcaagaccagcctggccaacatggcaaaacccgtactctattaaaaacacaaaaattagacagggttggtgatgcacgcctgtagtcccagctactcgggaggttgaggcaggagaatttgcttgaacccaggaggcagcagttgcagtgagccgagatcataccactgcactccagcctgggcgacagagcaaaactcggtctcaaaaaaaaaaaagttgtctctactaaaaagtgaccatgggacactacacacaataagcatgtttactctccatgcacatgcacaaccccctctcaggagtattcatatctcctcctataacctgctgaatatatatactgcccaagccattcagcacaaatccctgttccatcctcccttctctcaaagtgctgcctttctgtctaagcttccccccaatcaggatggccagcctgcaagttgtaacactttataataaataaaatatcttttctaaacttataaattgtgtgatttttaagttgacaacctataactccagcctaactatgagaaaaacatcagacaaacccaaaagggacattctacaaagtgcctgaacagggcttctcaaaactatccaggtcttcaaaaataaagtctgaaaaattatcacagatccaaggaagctaaggagacataactactaaatgtcatatggcatcctggatgggatcctggaacagacaagcagagtaggagaaaactgggaaatccagataaattgcggagtttagttcacagcaatgtactatggttgtgaaaagtgaaccacagtaatgtggtaatgaaagagggaactgagtgaagggtacacaggaactttctgtactatctttgcaacttttctgtaagtctatgaatattttaaaataaaaagttaacttaaattttaaaagcattttgttttattttaccatggctgggtggattttcagatctttaatagagtaagtcccagctagctaaagccagattgcagagataggcaggcaccatcaaaacccaattgagcctggcacagtggctcatgcctacaattccagcaattggggaggctgaggcaggaggatcacttcagcccaggagttcagggatatggtgaactatgatcactccagcttgagctacataattgtttttacaaaaatatttttaaattatccaggcatgatggcaggcaactgggtcctagctactcaggaagctgaggtgagaggattgcttgagctcaggaagttgaggctacagtgagtcatgatggtgccactgtactccagcctgggtgacagagcaagactctgtctcaagaaaatgaaaaatgacccgagtcggttttctttagctaaaaaaggtagaaaatggacacaggaaagggaacatcacacacaccggggcctgttgtggggtgaggggagagggagggatagcattaggagatatacctaatgttaaatgacgagttgatgggtgcagcacaccagcatggcacatgtatacatatgtaacaaacctgcacgttgtgcacatgtaccctacaacttaaagtataataaaaaaaaggtagaaaaaattaccccattgtgctctcctaaacacagtttgttgtcacagataattttaccacttaattttcaagggacaaggtgacttagcagagaaaattaaacccagattaaataatacttagagacataaggtccaactgcttacctgatgaaattcctcagaaactgactttcacaaatgtagagaattctgtgtgcctcacagtgaaacacattcctgatcttctccatgatcttcatggccatgatggtctttcctaagccaggtaagccatggacaaacaattctctgttcttgtggaagcttctggagaatatctcatactgctgggctgtgagcagatttaaaacctcatagctgcacaggtcactcaagagagacctgaagccgagcaagacaatcacgagggactgcagcagggcttccaatgtgctgggtgcctgcaaaactataggacgcagggtaatccatcggagacactgcagcctccaaagcctctgcgctgctctcaggactcaggcagaggaccttggccctgacacacacctccccagtgtagccccccatgttcaccagcttctgcttcaaagtaagggcagtgcaagtgcagtagtcctggccctgccagggctgttctatgctatcagcagagcatcacagatgactcctggcttctcctgcaaattcaggtccacagcctagcttctagagaggatcacaattccccaggagaaaggttgggtttgcttatttattaactcctctaatccttcattctgtgaggacagctccttccagagggattccagagtacatcgcaaatatcctggtagcactagatgtgaaaagaatgagaaattaggggaaggagaagaatcatactgattatgacaattagttataattaactgattaatatatttgattattaattacagatatttcaaatattcttctataaacattatattacaattataaaggaaaagaagctttgaaatatctggtaaatctcatctaaacccatgtgtttattatgcctttgacctaacctctctgagactttgctctctcatttgtaaaacaaaactaagaatagcacatttcctatggagaggaataaatgaagtaacataaagagtctggctcattgcagctgcttgaaaaagatgagtcctattccccatcccactctcaaagtgcatgaatctcaaaatgtccctgaacagtccccactaatgggggtagcaggagccttcccaggaagaaggtactcattagcacaatatttgcggagaagaggaagttacgtaaaagcttttattggcagttaattttcttcagtcctcaactaggagacccttgaagctatctctcctgaagcagaattgttgcatcacatacagatcaatctgaggctcccccccattacaaaagtcttctctttgtcacaggcaaacaaggaacaattacgtgacatgagaatatacttgtgctacagagttataaacttattttaggctgggtgcggtggctcactcctgtaatcctagcactttgggaggccgagatgggtgatcacttgagcccaggagtgcgagaccagcctgggcataatggtgaaaccctgtttctacaaaaaatataaaaatgatctaggcataatggtgcatgcctgtagtcccatctcctcaggaggctgaggtgggaggattgcttgagcccaggaggcggaggttgcagtgagctgagattgtgccactgcactccagcctaggtgactgagtcagaacttgtcttaaaaaaaaaaaaatttcaaagatcatggggtccaaagggagaaaaacaagaatgtttttgccctattgtggcagtggcagaatacaaaccagaatcaagatttgtaagtggtaatttgaaattgaaattacccaaactttactggtaattgtttattgttcattgttgcttgtgctttctcattcataccaggtgttcacacaacttgattatgcctgcaacgtggatgttagtgagtaggagatggcatctattatgacatacatctagattttagagatgttaagaagttgggggagataaataaaacccccatctccctgggacagagcacctgggggaaggggcggctgtgggtgcagtgtcagcagactttagtgtacctgcctgacagctctaaagagagcagcagatctcctagcacagcgttcgagcttgctaagggtcagatggcctcctcaagtgggtccctggcccatgtgtatcccaattgggagacacctcccagcaggggccaacaaacacctcatacaagagagctctggctggcatctggtgggtgcccctctggcacgaagcttccaaaggaaagaacaggcagcaatctttgctgttctgcagcccacactggtgatacccaggcaaacggggtctgcagtggacctccagcaaactccagcagacctgcagcagaggggcctgactgttagaaggaaaactaacaaacagaaaggactagcacatccactcagagaccccatctgaaggtcaccaacatcaaagacaaaaggtagataaatccatgaagatggggagaaaccagctcaaaaaggctgaaaattccaaaaaccagaatacctcttctcctccaaaggatcacaactccttgccagcaagggaacaaaactggacggagaatgagtttgacaaattgacagacgtaggcttcataaggtgggtaataacaaactcctctgagctaaaggagcatgttttaacccaacacagggaagctaagaaccttgaaaaaaggttagacaaattgctaactagaataaccagtttagagaagaatataaatgacctgatggagctgaaaaacacagcacgagaacttcgtgaaacatacacaagtatcagtagccaaattgatcaagcagaagaaaggatatcagagactgaagatcaacttaatgaaataaagcaagaagacaagaatagagaaaaaagaatgaaaaggaatgaacaaagcctccaagaaatatgggactatgtgaaaagaccacatctacgtttgattggtgtacatgaaagtgatgaggagaatggaaccaatttggaaaacactcttcaggatattatccaagagaacttccccaacctaacaagacaggccaacattcaaatttaggaaatacagagaacaccacaaagatattcctcgagaagagcaaccctaagacacataatcgtcagattcaccaaggttgaaatgaaggaaaaaaatgttaagggcagccagagagaaaggttgggttacccacaaacggaagcccatcagactaacagcagatctctctgcagaaatcctacaagccagaagagagtgggggccaatattcaacattcttaaagaaaagaatcgtcaacccagaatttcatatccagccaaacaaagtttcacaagtgaaggagaaataaaatcctttacagacaagaacatgctgagagattttgtcaccaccaggcctgccttacaagagctcctgaaggaagcactaaacatggaaaggaacaactggtaccagccacttcaaaaacataccaaattgtaaagaccatcgacactatgaagaaaccatcaactatgggcaaaataaccagctagcatcatagtaacaggatcaaattcacacataacaatattaaccttaaatgtaaatgggctaaatgccccaattaaaagacacagactggcaaattggataaaagagtcaagacccatcagtgtgctgtattcaggagacccacctcacgtgcaaagacacacataggctcaaaataaagggatggaggaatatttaccaagcaaaggaaagcaaagaaaagcaggggtttcaatcttagtctctgataaaacagactttaaaccaacagagatcaaaaaagacaaagaagggcattacataatggtaaagggatcaatgcaacaaaaagagctaactatcctaaatatatatgtacccaatacaggaacacccagattcataaagcaaattcttagagacctaccaagagacttagactcccacacagtaatagtgggagactttaacactctacagtcaatattagacagatcaacgagacagaaaattaacaaggatattcaggacttcaactccgctctgaaccaagcggatctaatagacatctacagacctttccactgcaaatcagcagaatatacattcttctcagcacctcatggcacttattctaaaattgaccacataattagaagtaaaacactcctcagcaaatgcaaaataacagaaatcataacaaaaatcctctcagtccacagtgcaatcaaattagaactcaggattaagaaactcactcaaaaccacataactacatggaaactgaacaacctgctcctgaatgactaccaggtaaataacgaaatgaaggcagaaataaagacgttcttcataaccaatgagaacaaagacacaacgtgccggaatctctgggacacatttaaagcagtgtgtagagggaaatttatatcactaaatgcccacaagaaaaagcaggaaagatctaaaatcgacaccctaacatcacaattaaaagaactagagaagcgacagcaaacaaattcaaaagctagcagaagacaagaaataactaagatcagagcataaatgaaggacatagagacacaaaaaccccttcaaaaattcaatgaatctaggagctggttttttgaaaagatccacaagatagatagactactaccgagactaataaagaagaaaagagagaagaatcaaatagatgcaataaaaaaatcataaaggggatatcaccacgaatcccacagaaatgcaaaccaccatcagagaatactgtaaacacctctatgcaaataaactagaaaatctagaagaaatggataaattcctggacgcataggccctcccaagtctaaaccaggaagaagtcgaatccctgaatagaccaataacagcttctgaaattgaggcagtaattaataccctaccaaccagaaaaactccaggaccagacagattcacagctgaattctaccagaggtatgaagaggagctggtaccattccttctgaagttattctaaacaatagaaaaagagggaatcctccctaactcattttatgaggccagcatcatcctgataccaaaacctggtagagatacaacaaaaaaaagaaaattttttttgatgaacatcaatgcaaaaaatcctcaaaaaaatactggcaaaccgaatccagcagcacatcaaaaagcttatccaccacagtcaagtcagcttcatccctgggatgcaaggctggttgaacatacgcaaatcaataaacgtaatccatcacataaacagaacgaatgacaaaagccacatgattatctcaatagatgcagaaaaggccttcaacaaaattcaacacccctccatgctaaaaattctcaataaactaggtatcgatggaacgtacctcaaaataataagagctatttatcacaaacccacagccagtatcatactgaatgggcagaagctggatacattccctttgaaaaccagcacaagacaaggatgccccctctcaccactcctagtcaacatagtattggaagttctggccagggaaatgaggcaagagaaagaaataaagggtattcaagtaggaaaagaggaagttgaattgtctctgtttgcagatgacatgattgtatatttagaaaaccccacagtctcagcccaaaaatctccttaagcttataagcaacttcagcaaagtctcaggatacaaaatcaatgtgctaaaatcacaagcattcctatgcaccgataacagacagacagccaaatcatgagtgaactcccattcacaattgctacaaagagaataaaatacctaggaatacaacttacaagggatgtgaaggacctcttcaaggagaactacaaaccactgctcaaggaaataagagaggacacaaataaatggaaaaacattccatgctcatggataggaagaatcaatattgtgaaaatggccatactgcccaaagtaatttacagattcaatgctatccccatcaagctaccagtgactttattcacagaactggaaaaaactactttaaacttcatatagaaccaagcctgcatagccaagacaatcctaagcaaaaagaacaaagctggaggcatcaagctaccctacttcaaactatattacaaggctacaataaccaaaacagcatggtgctggtaccaaaacagacatatagaccaatggaacagaacagaggcctcagaaataacaccacacatccacaaccatttgatctgacaaacctaacaaaaacaagcaatggggaaaggattccctattcaataaatggtgttgggaaaactggctagccacatgcagaaaactgaaagtggaccccttccttatgccttatacaaaaattaactcaagatggattaaagacttaaatgtaagacctaaaaccataaaaatcctagaaggaaacctaggcaataacatccaggacataggcattggcaaagacttcatgactaaaacaccaaaagcaatggcaacaaaagccaaaactgacaaatgggatctaattaaactaaagagcttctgcacagcaaaagaaactaacatcagagtgaacaggcaatctacagcatgggaaaaaatttttgcaatctatccatgtgacaaagggctaatatccagaatctacaaggaacttaaacaaattcacaagaaaaaaacaaacaaccccatcaaaaagtgggcaaaggatatgaacagacagttctcaaaaagaagacatttatgcacccaacaaacatatgaaaaaaagctcatcatcactggtcattagagaaaagcaaatcaaaaccacaatgagataccatctcatgccagttagaatggcgatcattaaaaagtcaggaaacaacagatgctggagaggatgtggagaaataggaatgcttttacactgttgatgggagtgtaaattagttccaccattgtggaagacagtgtggcaattcctcaaggatctggaaccagaaataccatttgacccagcaatcccattactgggtatatacccaaaggattataaattattctgctataaagacacatacacacatatgtttattgtggcactattcacaatagcaaagacttggaaccaacccaaatgtccatcaatgatagactggataaagaaaatgtggcacatatacaccatggaatactatgcagccattaaaaaggatgagtgcattgctttgcagggacatggatgaagctggaaaccatcattctcagcaaactaacacaagaacagaaaaccaaataccacatgttctctctcataagtgggagttgaacaatgagaacacacggacacataaaggggaacatcacacactggggcatatctgggggtggggggctaggggagggacaacattaggagaaatacctaatgtgggtgacgggttggtgggtgcagcaaaccaccatggcatgtgaatacctatgtaacaaacctgcacattctgcacatgtaccccagaacttaaagtataataagaaaagaacttgtccatataacaaaataccacctgttcccctaaaactattgaaataataaaaataataatagtaaataaaaaataaaatagattagaaaagaaaaaagttgaagagatggaagctcagaaacattaattaactttctcaaagtcactcaaacccatactgaaagagaaacccatactcttccgactaacattataacctcataaacgtcatctgtcacgtcttttggtaccctggctagcctcctgggtgactgctttgtcttttttttttttttttttttgagatcgagaccatcctggccaacatggtgaaaccccgtctctacgaaaaatacaaaaaattagtcaggcgtggtggcaggcacctgtagtcctagctactcgggaggctgaggcaggagaatcacttgaacccgggaggcggaggttgcagtgagccaagattgtgccactgcactccagtctggtgacagagtgagactctgtcagaaaaaaaaagagaaagaaaggaaggaaggaaggaaggaaggaaggaaggaaggaaggaaggaaggaaggaaggaaggaaggaagggaagggaagggaagaaagaaagaaagaaagaaagaaagaaagaaagaaagaaagaaagaaagaaagaaagaaagaaagaaagaaaagaaaagaaaagaaaagaaaagaaaagaaagaaagaaagaaagagaaagggagagaagttaaacttttggactatacattcttatgtagatagtgggggaaatgaagatggccaagggacgtggtaaatctgacaaatggagtaaaaggaacatcaatgattcttagtcttttttatttcaaagaacttgtatttgggagtggttgtgcaaatcaataaaacttaactgtgctatggtgagaagggggctcctaagactctcagaattgtgccacaacctgcacaatcacttttttcttttgcttgactatgcattcgtgcatgccgtgaaaacatttcgttatttgattcagtagcgcaggaaacattcaatgaaagctcacactaaacacagtcctgtcagagatactaagaatctgtctgctggggacatatggtttaggtcacaacaaattgccataacgtggcttaaacatatgtgaagaaaaatccatagccccaaatgcctatattggttaaagagaaagataaaagtagagtgaatttacagaacttagaaaaagaactagatcacaaaggaacacaaaataaagggaataataaatgtaagggcaggaggaaattgaaaaattaaaaaacaatttatttgattaattaacaagattaaaagttttgtttttccttgttttgcttttttgtctggttttccatctttttagacaacccactagcacttttatttttttcactagcatctttattattttaaagaaatgaacaaataaaatggtggttgatgcaggtgtgaaaaggaaatagacttctgagcaggaaattatgtagaaggccagatctttcatgatcttactcatatgtctgatacgtgccttgtaataaagcttacaactgtcttcttctgtattttatgaccattaaaacaaccttgtcagattatttatacaaagtgccatttgtgacatacaagctttaaagttttaatgtttattcctatggacatgttctttcaagtatagcatgccattggtttccatggataaaattttcatattggcaactctcttcttttattatatttacttatttatttatttatttttgagatggagtttcactcttgttgcccaggctggagtgcagtggcgcgatctcggttcactgcaacctccatctcgcaggttcaagtgagtctcctgcctcagcctcccaagtagctggaattacaggttcctgccaccacgcctggctaactttttaaattttttttatttttatttttttaatagagatggggtttcatcgtgttggccaggatggtcgtgaaatcctgacctcaggtgatccacccacctcggcctcccaaagtgctgggattataggtgtgagccacccagcccggcctgacaactctcttctacatctaaaagtgcaaattattttgtatgaaatagaaacctcaagaactgctaatcttttcttctccctttaagacccaaagaaaaaaatcaatacacagaaaactctagtagatttcttcctctaaaatcatacctgagaaagatttggttccatcaaaatatgtattaagaaatttgaaaacataaatgaatggtttttaaaaataggcacaggccgcgcacagtggctcacgcctgtaatcctttgggaggccgaggcgagtggatcacctgaggtcaggagtttgagaccagcctggccaacatagcgaaaccccgactctactaaaaatacaaaaattagctgggcgtggtggcacatgcctcttatgccagctacttgggaggctgaggaaggagaattgcttggacctgggagttggaggttgcagtgagccgagattgcaccactgcactccagcctgtgcaaaagggagtgagactccatctcaaaaaaaaaaaaaaaggcacaaaagcaaagcttgtttaataaaaaattgatagtgcagataaatcaataacagaataaaaagcctgagggacgttatcaagaaaaattttataaagtacctggctccgttgggattactggaaaactttttttaaaacttcaaaatcaggccaggcaccgtggctctcacctataatccttacactttgggaggccaaggcaggcatatcacttgaggccaggagttcaagaccagcctggctaacacagtgaaatcctcacccctactgaaaatacaaaaattagccaggcatgatggcaggtgcctgtaatcccagctactcaggaggctgaggcaggagaatcactagaacccaggaggcagaggttgcagtgaacaaaaatcattccactgcactccagcctggtgagaccctgtctcaaaaacaaaaacaaaccaaaagacaaaaacaaaaaaacttcaaaatcatataattatcacattattaaatatatattgtttgacacacaaaaaatggcaggctacaacattcagttttatatactttataaacaatattatggtgatcaataatattttcagccttatctcttatcatcttaataatattacattgttttacaatttgtaaacatcaaataaacagaattttatattctgcttttatcacataacacctctacaaccctttcaagttgttatgcttttagttatatgttacatttcatcaagaagatgcttaacacaatgttgtatgtagaaactatttttaaaagatgcatattaatgaactaggtacttctcaattgttgaaattgctctcaattcatacttaaccataaataatagtcataaatcatttactcaacaaatatttattggaaatctattatttgcctagcactgtgctaaatccagaaaagacagtggtgaacaaaacaaacctggtccctgttcttgaggaggttgacagtaaacaagtgactcctatggacaaaagtttagaatgtcaggggagcttagaatggaaacactgccctcacctggcagttggagagggaatgggttcagagaaggatttccagaaaaagtaacatttgagttaagatctgaagaatgcaaatgaggtgaagagttaatttggtgaagaagggggggaagaattttctagacagaagtaagaaggagtatgtcaagttcaaaagactgacagcacagagctggaaggatagaggcaggagatgaggttggaaccatgctcaggtgtccagctgtgcattgtctggtaagccactttaagggttcctggctttaccctaagagtaatgggaagctggccagacaccatagctcacgcctgtaatcccagcactttgggaggccgaggcgggcagatcacctgaggtcaggagttcgagaccagcctggccaacatagtgaaacctcatctctactaaaaatacaaaaattaaccaggctgcacctgtagtcccagctacttgggaggctgaggcacgagaattgctttaacctgggaggcaaagtttgcagtgagtcaaaatcatgccactgcactccaggctgggcaacagaaggagactctgtctcaaaagaaaggcctgggcacggtgtctcatgcctgtgatcccagcactttgggaggccctggtgggcagatcatgaggtcaagagatggagaccatcctggctaacacggtgaaaccccatctctactaaaaatacaaaaaattagccgggcatggtggcacatgcctgcagtcccagctactcgggaggctgaggcaggagaatctcttgaacccgggaagcggaggttgcagtgagctgagatcgtcccactgcactccagcctggcaacagagcaagactccgtctcaaaaaaaacaaaaagtaatgggaagccattggaggttgttaagcaggaagacacagcatcagatgaacatttttcaaagtcctttctagctgaagcaggttagagcagtcatggaaaagacctttcaggatatggtttcagcagcccaaatgagaacagatggtgatgtggactaaggtggggacagtggagaagtaggcagagttgagagagatttagaattaagccggcagagttgagagagatttagaagtaagccgagggacctggcaattgatgggaattcatgtctattatttcaattgctcctcttccatctcaatccaatggataagaaccagaatgggcccagtcactggcgggagctgtttatgagatactgcttctcaccccagattaaaaaccatagcttagccaaacattgaaagggagaaaggatccaaatgtggagagagaacctggatatatgccaaagcttaagcagccaaaagcagaaatctctatcaaggcctgggatcaagagttctgatacaggaagagctaatcaatcaagagcaaataaaaacaaagggcatagtaggaaggttaatgcttgtggtgctcctcatgagctgaaagagctaacatttattgagccaggaactgtaccaaaaactttacatacattatctcattgctttctcacaacaaatactattatctttattttaccaatgaggaaactgaggttgggggacatattcagagtcatatgggtgaggctcaaatccaggagtatttgattccaaatgctagtgtttctaatcaaaacctagactctctctttctccttttttttttttttttttagatggagtttcactcttgttgcccaggctggagtgcaatggcgtgatctcggctcaccacaacctccacctcccaggttcaagcaattctcctgcctcagcctccctagtagctgggattacagacatgtgccaccttgcctagctaatttttttttttttatttttagtagtgacggggtttctccacgttgttcaggctggtcttgaactcccgacctcaggtgatccgcccacctcaggctcccaaagtgctgggattacagcaccgcacccagcctttttttttttttaaagcaacagggtcttgctctgtcatccaggctggagtgcagtggtgcagtcatagctcactgcagccttcaccacccgaactcaagcagtcctcccacctcagcctcccaagtagctgggactacaggtgtacgccaccatgcctggctagctttttttgtttttgtttttgagatggattcttgctctgccgccaaggctcgaaggcagtggcaggatctcagctaaccgcaccctccacctcctgggttcaagtgatctttccacctcagcctcctgagtagctggaatgacaggcacgcaccaccactcccaggtaatttttgtatttttagtagagacagggttttaccatgttggccaggctggtcttgaactcctgacctcaaatgatccaccttcctcggcctcccaaagtgctgggattacaggcgtgagccaccacacccggccctggctagtttgtttgtttgtttgtttgtttgtttgtttgttttgtagagatggggtcttgctatgttatccaggctgttctcaaacttctgggctcaagcgatcttcccaccttggtctcccaaagtgctgggattacaggcatgagcaaccacatccggccaaaaatctagactcttaatcattgtgcaaactggtctcccaaattattaggcctcttggaagacaagagagttttcattactctggtaagaataaccattctggaataatctccctggtatttgtgatagcatttattttataaaacacatttgataacaagaaaaacataggtctatttctgttaaacacaggcaagcaaaagtcacatgtaaaaacacagctagacagaacatctagggccttcacaagtatctgctttaattaatgttggtaaacaaaaagacccaatgcagtgacacatttgcaaacattatatctaaatccaactagatcacagtttcccagtcaatatagcttaagtttctctgaaaacaaaatagtttatatattacgaaaaacaaaaaaacacagttgggctcagtggctcatgcatgtaatcccagcactttgggaggctaaggtgggcagattgcttgagcccaggagtttgagaccagtctgagcaaggaaatccagtctctacaaaatataaaaaaattagctgggtgtggtggtgcatggtctatagtcccagctcctcgagagtctgagacgggaggatcacttgagcctagggaggttgagactgcagtgagccacgattgcatcactgcactccagcctgggtgacagagtgagagcctgtctcaaaaaaaaaaaaataagaaaaataagaaaccccttttcatagtgatgaagcaatcagctaactgctaaagaatcttcacaggcgaggctgggtacggtggctaatgtctataatcccagcacattgggaggccaaggtgggacgattacttgaggtcaggagtttgaaaccagcctggtcaatctagcaagacttcctctctacagaaacgaaaaaaattagccaggcaccctcacgctcagtgcctgtagtccccgcactttcaaaggctgaagcaggaggatcctttgagccctggaaggtcgaagctgcagtgagttgtgatcgcaccactgcacgacagcctgggcgaaagagtgagaacctgtctcaaaaaaaaaagagaatcttcacaggcatcccttcctcccaagtctcctcacttgtcttatctgaaggtttgttccccagaactatgagaaccctctacatctctttctctcagcccagccaggttcctctgggcttgagtcctacatccctggcctcagctacaaggtgagtacagtctaaggaccagctcctctcattgtctatttcacttatttattaaaagtgtagacctaaagtgtctacttcatcctctcttgcctaaagtgggtatatctggaaaagtctgtagccacagaggagattttcatcttagagttatgaggtctctttgagagactctccattccattgaataagcatggcttagatctctctggacaatctgtacttaccttgggagttaaaagattccacagggttgagatgctgaaaagatgagaaagttccaggagctctgatctacttaggagtccctgcagtttggctgaggacagtggtaatcctcaaaggctagaaatggctttcaaatctgagcgctctgcagaacaagtccaggaaaaatgctgctttggtatttctgagaatgaaactagaaggttgccgcctttttaaagtttccatttctcagaattctcctactcattttaggcctgccattctagcctcaaggggggaatatgtgctatttcctgtttatcaatagactaagtgggccaaagactagttctggctaaagactaaagaaactttatcagaagaaatgcttcaaacactttggagaataatgctacaaaaaagcttttttggatacacaccaaactgttattaaggattactttctcagaagtagaactggagaggaagaagatggaaagggaggagagaattgttactttgtacagtaggcctgagttactcaacaaatattttttattggcaaggaaaagggaaaaaacaaaacaaaaagaaacagtgaaagagccagaaaggaaattaaacagtgcatctcactgactttctcattcaatttttatagtagcctccataatcctaatagttgttgtaattagagccgagatggattcactgctattaatttagctgctaatactgttgctattgttctgatcaagtttctgctactttttgacctgctgtctccctcaacagctgtaggagtcacaattcccttgagctcttgttggtttcttgttccattttttttgggtttctatccttatacattgaaaaaattattacagtgtggatttagcaatcatttttagctataagaaaaggtgctgtgcactagagggaattgaattagagatgtcattcgttaatcagataattagttcccaatcttggctgcttgttcaaatcttttggcatgctttttaaaaattcagatgctaaggtccttccccagacattctgaattatactgtcaagtagtggtgcaatatcaggaggtagagacatatcacatatacacaacacacacatataggcataaacataaagacagacacaaatagatcttataattttcatttaaaatcttagccatgattaggtatacataaacacaaaatttaataattttgataaaaattgattctcatctttgcctattaatattttctttcgatctcatctttccatagacatttgtttaggatgacagctttcttttaaaaaaaaatccttttagatataaaagttcaaatcttcaaaggtatacctgtcttaattgtgactcaaaaccagtaagtttttatggcttaaaacctataagccttttatcacttaaccatggatgtaagagacatccccaaggaggatgcaaaccatgcagcccttttgccgggcgcggtggctcacacctataatctcagtattttgggaggctgcggcgggcagattacttgaggttaggagttcaagaccagcctggctaatatggtgaaaccctgtctctacaaaaaatacaaaaattagccaggcctggtggtgcatgtcagaaatttcaggtactcgcgagactgaggcgggagaatcacttgagcccgggaggcggaggttacagtgaccaagatcacgccactgcactccaacgtgggcgacagaatgaaaccctgtactcaaaaaaaaagaaagaaagaaagaaagaaagaaagaaagaaagaaagaaagaaagaaagaaagaaagaaagaaaagaaaaatgaaggttcaggtgacaaacgcctcttatggactgggaccttttattaagacaaacttctctgagagctggcacaggcggacgaaaatgctgcttatcttagattttgggttccaggctggtggcctgatgcaaaccagcaacacttgcgccctctggcggcgaggaccagagagactattttaaagccaagctctcgggacataaaacgaaggaagaatcgaatctcatgattttcttccttatgacaaacaacacaaacgacagagacaaggactttttattattccttggaggctgtggatcatacccagaccaaatttataaaagttacaattcaaagaactcattcttacaaatgtttttctcctgccaatctgaatttggaaaggaagagacaaggaaaatttacgttctcctctctacagggcactgcagatagatatgtcgggggactgactttggtaagaattcttaccttctgcaggttctgtcagctcttccgggatcctacccacaggctctgaagtgagtggcgcatcccaaccttctagggtcccattttcattgccagaaaccacaagggaggcaaaattttacctctgttctcttagggattttggctaggcctgagaattaacttgacctatgacagattaacaagagaaaaacatacagatttttacatataggagcccctatagaaaattcaagacctaaagaagtgccgaaacctaaatgcttgtatagtagggtgagcaaagagtacaactgcagaaaagtaattacattaaagtatgtgtgaaggcaaagtaagataagggttattttagcaaggtctgtttgtacagaattatcctgggtatgacccccgtcaaagaatgttttttattctcctggtacagggagggcatctttcacgtgggacttttatctcctgttttaaggaagaaaaaaagattaagattcactttttgcatctgctattttctttttctttttattattatttcaacagttttggggggaacaggtggtgtttggttacatggataaattcttcagcagtaatttctgagattttggtgcacccatcacccgagcagtgtacactgcacccagcgtgtagccttttatccctcatcctcctcccacccttcccccaagtcctcagagtctattatttttatgcctttgggtcctcatatgcatctgctattttcaagtgcctttagctccaaataatccttatgccaaaatggcatatttgggggcaacacattctgccacccttcagtacctttggccaaacagaggtttgctttccagacctcctgggttctgtgactggcaactgcacaagcagggcacgctcacatgccatcttcccacagtgacccgtggggaagtgacgaaagaaggctgcttctgtcctaattgtgttgctctgttgtacagttccctaaaatgtctgcccccaccccaccccaccctaccccatattttatggaattaggtgaagagctttttcctcctttacttgcccatcatcctcttcttccctgtaggcatgagttcctgctgttcatgaaaccaattggaaagtaaggggcactactgcactgataatcttggctccttgctcaaaggcacggagaaccacctctccctaacctgcaatgtgggaaatgtctcacatactatatgggagactgcagagaagaaaggggtcaccagaacaataaacccaaacaggatatacaatggaatgtacgctatgattacaactctgctaaaatatatctgccagtggactagcccaggaaacgaacaagcaaaagtgaaagcaactgcatgattcagcggtaataatagggattgaattttcttttgtggttctctattttctaatctttctataatgtaattatatagaacttgtaatgacaggtatatcttttatgtttcttggtatacaaaatgctctcctctgaacgtttcttattatgtaagtcatttaagtaatcatattgattttgtagaaaaattttagaggctaaaaataccatcagtattctaagtgtatttgatccaagcctcagcataaaatcaaatgaattactgtcaacacagaaggagacttacgtctttaactttgatgtacaaacagaagaacatagaagctaacatggactttggagtcagacagacatgagttcagatctcagattcagaacttactagttctgtgatcttgggtaaggtattattattcatttgcttatttatttacttatttatttatttttagagatagagtcttgtggtgttatccaggctggagtgtagtggtatgatcatggctcactgtaaccttgaactcctgggcctaggcaatctttccaccttagtctcccaagtagctggactacaagtgtgtgccaccacgctctgctaatttagaaaaaaaaattatagagacagagtctctctatattgcccaggctgatctcaaactcctggcttcaagcagtccttcagctttggcctcctaaggtgctgggatcgcaggcatgagccatcgaaactggccctaagtatttatcttttaagtcatagcctcctcagctgtaaattggaactagtaagatctaaaatttattgagagctttccacatattatgctttatttaaatgtcttatttatttatttgtttgtttatttattttttgagacagattctcactctatcatccaggctggagtgcagtggcgcgatcttggctcactgcaacctctgcctcccgggctcaagtgattcctctgcctcagcctcccaagtagctgggattacaggtgtgtgccaccacacccagctaattgttttgtatttttagtagacacagagtttcaccatgttggccaggctggtcttgaactcccaacctcaagtgatctgcccgccttggcctcccaaagtgctggaatttcaggcgtgaaccaccgtgcctgggcaatgtcatatttatttattatttttagttttttagacagtatcatgccctgttccccaagctgcagtgtagtggccccatcatggctttctgtagcctcgaccccctgggttcaattgatcctcccacctcagcccccaaagtagctgggactagtggcacgcaccaccatgcctgactaatttttggggtttgttttgtggagatggggtttcaccatgttacccaggctggtctcaaactcttgggctcaagtgatccaactacctcaacttctcaaaatgctgggtttacagctgtgagccacagtggtcggcctaaatgtagtattaactttcaatcttcatctttacctgaagacgtaggtatgaattttacctctattttatagatgagaaaactgaatcttgaagaggtaaagtaacttgctcaaggtcatccagccaattaaggaatagagttggaattcaaggccagagtcaatccgacccctggactcaagctcttaacactgccttatcgtaccttactgctatacataattcaaagactggttgggggttaaaagatatattttaaaaacaatttgcaccatgtctactacatactaagcacttaatatatgtttgttgtaactgtatatatcagaggagacatcaatgggactgtaaaggtattttgatgtattagctgttgactggtggggtctgtcatatttggctggctaggaaggaagcacctgcttccttcattgtttccccctctaccacatgcctctttcaagctgtacaactgggcaaagacagccttccctgattaaagcagggataagggactttatctgcaattggcccaagagaactctgaagtagtaaacaataacaagaggaaatacattaaaaaattaaaaggtcctgttcatggtcagaggcatcttttcttttctctttgtaccttatgtcagttttaagtgaccacagattttttttaatacagtgtcgaggttatataattcatgtttctacccatagttctccaagttaagatcttctctgcagctccaggttagggtggtgagccttagtttcactctctgtgctcccttgcagcccttttagagtcacctgtttccaagatatcattgcctcttttttgtcatcagaacctgatatcagcattttgttctcttagttaatgcaacaaaatttatacgttatcagatgcagtgactggggttttctattcacttcccatcagaactaatctgaataaagtgattctttcatccaagtcaccttttcatccagtaagcccatctccaggcatttataaatataccagaaaaagaaaaggttgtatgcctgagtatgtgcctggcttaattaaattggtgtaaaattgctagtgacacgaatgacaggggaatgatcgctgaaatttcatatgatctggctaggatgcagtgcacccattaaaaatgattatattgaagactgtgctaccacatgaggaaatgcctgcattagtcagctaaagctacaaaacaaacaaccttgaaatctcagtcattaaataataagcttttatttctcattcatgcactttcagatcagctggattttggctaagctagttaggactggtggaacttggctccaggccatgagttgagttcaagttggattcacatatctcagtggctggtgggccacccagggtacattctttgtatggaaacagcagaaacccgagagagtaaacccaatgctgaaagtccatgtacagcctctgtgcacatcagaactactaacattccaagtcacatgaccaaggccacattacaggggtggaaaatatctctacctctaatgttagtaactacaaagggtatagatatagagaggtaggaaatattgggaacaataatgtagtctatagcaatatctcacaaaacaattaaatggaaaaagcacacatatacgttataaagttgatggcacaacttgatcataactgtgtgaaaatatttttccatatcaacaaagaatagaaataaataagcaaaaatgaaaaaatgttacacccagataacaagatgatttaagaactttttttttttttttttgagacagagtttcactcttgttgcccaggctgaagtgcagtggcgcaatctcagctcactgcaacctccacctcccaggttcaagcaattctcctgcctcagcctcccaagtagctgggattacaggcatgcgccaccatgcccagctaattttgtatttttagtggagacagggtttctccatgttggtcaggctggtcttgaactcctgacctcaggtgattcacccacctcagcctcccaaagtgctaggattaccagcatgagcccctgcgcccagcctgatttaagaacttttaattttgcctttctccatttccgaagcttccatgataatattatattacccttctttttaaaagtaagttttagaagcttctcacagtttctaaagcttctcttttatcttagttatttcatttagttaattgctttatccatcatattaagactttgtagaaaacattgagaattctaaaacaaccaagttagtccattattcttagtccccaccagttcctaatcttacatttgaatctaatgaactatcatcatagatccttaatttgacctgttgcctaaaaacaattgagttgcctttattgttcccttattcttcattattacagtgttaaagattattctccacactgacttctttgaaatctctaacattagaaattcatactatcgaattgaatcattgtagattctagttttctaaaagctacaagtacaattcagcaaatatttactgagcacctgccctgtgtgaggcactgtactagttgctctaggggaaataaggatgtgtaagtgactcatcctcttactctcaaggagctcacagtcttaataggaagagaaatgtgcacacattttttgaggacagaaagaacagactaggagaagggttcaatggttctcaacccttgtgacatattagaatcatttggattttttttaagagatagagtcttgctctgtaacccaggctggagtgcagtggagtaatcataggtcactgtagcctcaaactcctgggctcaagtgatcctcccaccttggcctctggagtagctaggattaaaagcatgcaccaccatgcccaactaagtttttaaaaaaattttttttgtagagatggggtcttgttatgttgcccaggctggtctccaactcctggcttcaagtgattcccccagacctcagcctctcaaagttctggtattacaggcaccagccactgcaccctgcctggacaacatttaataaataccgatgcccgagcctgtgttcagacacactgaggttaattagtctggtgtctggcctgatcactgattttttttaagtcgcccaggaaattataatgagcatccagggttgagaatcactgagttagttattctactttcatcctgattgaattgtttcactagactaagaactgacaaagactctcaaattcaatatttaaaacaattctttacaaatcaattcttttattaaaaattatatgatgcatgcatatattttaaaaagtcaaatggtactaaggcttatgactaaaatatagcaattccttgtcccactcatactccttcatactctgttgactttgactgtttaaattatttttatagaattcatacatctccctacatcagaatgtcaatgcactggcatcttttgcaaaaccgattgctgaacttcatttcctcctatccaaaactaccctaaagcccccaaggaaaggtaaaaaggaagaaacaccaggtaattagagcagtaggaagcaagggagaggtttttcttttcaacccgtgcctaggtacagactagcccttctaatgggcctaagcaattcagaaaggcagctaagagagcttctcgaaaccctgcctgctcttccacctcttggaaggctgaggggctttatctaaaatcataaccaaaatttccacatgtctcctggattcaagcctccccagagtcaatcaagttatcctaaacttttctagaagttaaaaacagtttggaaatatgaatacttccaaagcaatttaaaaatccttgcaaaagcaagagtaatttgaagagtacagaattggctcagccatttggggaactgactagaaaaggggaactttgatttcatttctaatatgtatcatatacattggaaagtttcacttagggagataataaaagtttaattgaggtagtaggcatttgaaaaaggatgtgattgccaagtaaggatttcaaaggtggaggggacagaaaagggtttaaagactgagaaaatggcacaggcacagaccaggagtcggggatgtgtgtgggtggtgttggtggtaaagttgccaccaaggatccccataaactctgagagttggatttaaaaattagcaccaagtcataatggaagaaatcagagatgtgcaaaggccccttgtaggaagactactttccaggccagcggcagagtataaggcatttctagcctacatgaatgtattcacatacatagaggataaatgtaggcaaaatttgtatatgttgggggcagtaaggagagggttggtggtgaacctggaaattttagaaaccaagacagagaaaaaaaaattcatctgagggcaaagaataatgaaaaactagtcatccttagcattctaaatttgctttagcttgtaaactgtaaactaatttgtctagtccttgtgatagaaatatctttattttagaaattattgcaatcttattttatattaagttggtgcaaaagtaattgtggcttttgcacttttgcaccaacctaatagatattgcaatagtctaatataatctgaagatttttaagatttgaatcaaattaccagcttcccttactgtaaggctatgttcatataatttggcttcctatattactgttgagggcactgattagcaaaagcatttgacccacttatgactatggtcctcactataaattaacagagtaacattttgatgtatgcattggtcctttgtgagcttgattagcataaagcatccccaagagactgatctagacttggtacaaaaaggcaatcaagttctggacctggaaagcttgagacccatagccagtatgaggtgccagtcaattggctacttttgagacctatgcagtcaaagtaaccagcctggagggcaccataccaccacccaaaaattatgccaggtgggctggggtgcatgagaaacatggggagatggagatacaataaaggatgtggttgggagagcaagtcagggcatattaatgaaagccttgaaaattggttaggtttgaaggctgtggggactcattgaagatatgttagcaaggtattacataaaatcagttctctatttgaggaaaaattctctgatggatgacagctggattgagtgggaaagctggagacaggggactaatgaagtctattgtaattgtataggtaggaggtgaaggaaattgtgaaaaggccagtggcattgaaatagagtggaaggctcagctccaagagacatttctgtggctccaggccatactgatgtgccttgatttcctcacttgtaatattaaaatggagtcactgctacctgtctaggagaaaggactctgctcttcctgtcttcctctattatttgtaataattttcagtaggctgccctcttttcataaagcaggtagaggtgtttaatggctcttgaagcaaagcagagcttatgaaattcctctgactggtcacattctggactaagcccaaacacgacagtcctctccaggcctgaaaattgctgaatactgtctaaaacaatgtgacttccccaaacaccggtggccgggctaaacacaacctctgatggtctgtgggtctcaattaattccattgctttgagtagtgcaagcctatagcgtcctctgtcctcccctctcctgcacagaattgctatatctttgggcagatagccacactggaacaggctgtgacattttcttgccacatagttagctatttgttctgttgtcagattagtctttgtctcacacaccccaggcagagcctgggcacacgttgcttcctcataggcagtctcgctgaacaatgctaatgtgtctggagacatgttggagggaggattttctttgatcctcttcatttcttctttcataaccttcgctatttccagagcacagtggatcccactggtgattgtttttcgaggaaactgagcagatggagggggaaggccattgacatctgcgtgatggatttgaaaagggtcaagaaaaagccagagaatcccatggtgaaggttttcacttccagtccccttcgcctttggatgggtgatgttcttagccttcatgtaccaattgccatatttgctgcagaaattctcagtctcatccatcactatgtgtttaatctttagaaactccccttgcatgaaagttttcctggtcacagcttggcaggtggtttgttggctgtaaggacggaaaaaacagggcttgaggcatatcaacaaagagaacaccagcagtcattactctctggaatggaatcagaggctgattctcatctgcaggctgagtcattgattcagtagtgtgaataccacaaaactgttctaattacaagttacctgacagacagaatgcataattttacaccttgctctttggggttatccagttaaacctgcatgtgaaacttctgaaatgaacccaggtaacagattgtattatgtctattagtaatccattcctactgtttggcaatcctgaagacaagttcattacatctaaaggaaatctcaaagttaacttacacttcttactaccatttctttactttctatcctctttagagctggaaaacagtttcctcgatgcatatcataatttttatgtgcaaaaaaagcacggactagttcaaattcctctaaagcttctttagattttggtaagagaaacatcaagaggatgctgagttccacgacacatcaagtagggtaccaaatctatggggctatgcctctttggagctacctcatttacttagctcaattttcctttatagtacgctttagcatatatgtattttttctgaacgaatttggttgttttttgcctcctttaatttggatccaagtaacatcactcatccctacagattccatgattttacatatgcagttcctagggcctttactccctatgccttgaatcataactatgttcttctcttctggtttggactgtgtggactcaaataaaagtactgattcttagccatctttgtatccctctcacattaagggtttcatagatatttgttgagttagccttttgactggagtattttcaaacttagctatgaaacttaataaagaacgtagtcctcagcacagtctacaggatccctgataatctggcgtctacctccttttcaacatcaccacctgctgtatacccacagtctgcacagctctagtcagacctaccattctggttctctggtgtctccatgtctttgaacttgctgtgccctttgcctggaaagccctcccctatttgattcacttctcctgctgacttcttaacagtgtgcccaatggtctccttcactggggaatatttaccaaccaacctctagcctgttaaaatgggcatgaggccaggtgcagtggctcacgcctgtaatcccagcactttgcgagaaggaggtgggcggatcacctgaggtcaggagttcaagaccagcctggccaacatggtgaaaccccgtctctactaaaaatacaaaaattagctaggcgtggtgatgcacacttgtaatcccagctactcgggaggctgaggcaagagaatcacttgaacccaggagacagagtttgcagtgagctgagatcgtgccactgcactccagcctggttgacacagcaagactccgtctcaaaaataaattaattaattagttaattaaaatgagcatgtctttattattatacaatactcacattgttttttttatggcaaggtcttcaatatgttttctcctctaacactaaatgtagcacagtagataccacatcaacagtgctcaaaaagatttattgaataacaaaaccaagccaaaaatcataatgattttgccctcttttgctgaattctataatgaccaattcattttactaaattaaaagttagagatttaaatcagaagtgaatttgcatattttctaaaattactgatgcagaacaagtcaaaaatgaaaatattttatgaacaaaatcaaactgtatttaaattcaagtttcactaggtacaatgtctaattagcagaaataccctatgactttaaaacattacatatcaaacagaaagtatacttaaagcagaatgggttcatttctacttctcttaaatgtaaggccatggattgtgagaaaaaaaaaagtttctggttctgtaaatgtaagttatgcacatgtgggttatttataatgagatgtttaaggttgaacattataaattacctgtttacagctcaattccatgattatttggaaatgtgtatatagtttgggctcttgcacttatgcaactaaggcactgcaaaaacttaaactaaaaacacaaatcacttttgtgacactcttgaaaagactgactaaatatatttttgtgtgtgtgtgcaaccaactcccagcacatcaggtgggtaactcttcccacacgaatagtctgcctaccctcaggaatattttttgtctgtggtacctcagcctatcgttgtttgaatggctcttcagaatctatatgcttcctctcattcttagcgccccctatgaccatctacactgaacaagatttatacaatcatgtcgtacctaagccccgcaacaaaagggtacccattcttccttttgttatcggagcaggagtgctaggtggagtaggtactggcactggcggtatcacaacctctattcagttctactacaaactatctcaagaactaaatggtgacatggaacgggtctctgactccctggtcaccttgcaagatcaacttaactccctagcagcagtagtcgttcaaaatagaagagctttagacttgctagccgccgaaagagggggaacctgtttatttttaggggaagaatgctgttattatgttaatcaatccggaatcgtcaccaaaaagttaaagaaattcgagatcgaatacaacgtagagcagaggagcttcaaaacactggcccctggggcctcctcagccaatggatgccccggattctccccttcttaggacctctagcagctataatattgttactcctctttggaccctgtatctttaacctccttgttaattggaccctgtatctttaacctccttgttaagtttgtctcttccagaatcgaagctgcaaagctacaaatggttcttcaaatggagccccagatgcaatccatgagtaaaatctaccacggacccctggaccggcctgctagcccatgctccaatgttaatgacatcaaaggcacccctcccgaggaaatctcaactgcagaacccctactacgccccaattcagcaggaagcagttagagcggtggtcggccaacttccccaatagcacttgggttttcctgttgaggggggcactgagagacaggactagctggatttcctaggctgactaaaaatccctaagcctagctgggaaggtgaccacttccacctttaaacatggggcttgcaacttagctcacacccgaccaatcagataagaaagagagctcactaaaatgctaattaggcaaaaacaagaggtaaagaaatagccaatcatctattgcctgagagcacagcaggagggacaatgatcgggatataaacccaggcattcaagctggcaacggctaccctctttgggtcccctccctttgtatgggagctctgttttcactctattaaatcttgcaactgcaaaaagaatatatatatatgtgtatatatatacacatatatatacatatatatatacacatatatatacacatatatatacacatatatatatacacatacatatttttgtgtgtgtgtagttggtaaaactcttacgtcacaaaatcctttagggagtcgctttcacaaacatagaggatctcttttggtttgcagtgaaacaagtccttaattttctccatgatctttatggctagggctgtcttcctgactcctggaaagcagtagatgaataattcacgtgtcttctgaagactctcagaaagcaactggctctgctccattatgagcaagttgaaaaattcacagcccatctggtcactcagaagagatctggaggacagggagaccaccaccagagcctgcagcaagtcttccatttcctcctcatcagcaagcctgtaggacctggggtaacgcagggggatctcaccaggtctactctgtgtgctgctcaggtgtatcagccttggaatgatgcacactttccctgtgtaaccaccaacagtttgcagtttctgctttaactgatgagctgtgtttcgggcatattcaagtcctccaggccaattggggtctattaagattgtatagagtaccacggggctgttaactgctatcaggagagcatcacacaggacattctgttctttcctgaagccaacatcaccagcccagcttctagaaaatatcacaatcccctgagaacaaggatgtatcagggtcttcattaaaccctccagttctttatgatctgagaacagcttcttacagagggattctggtttaaattgtacctcttcctgtgtcactgaaaattcaaggaatagatgttaccaaaacttacaaaagcatgtggtaagtattcctgcaacgttgcagaaaaaaatgatacctggtgcatttgggaaaataagagctttcctttagaattgtgattcttaatcaggagcagttttactccccaactctcccccatccccacggacatttggcaatgtctggaaaattttttctttttttgtgagacggagtctcgctgtcacccagactggagtgcagtggtgtgatcttggctcactgcagcctctgcctccctggttccagtgattcttctgcctcagcctctggagtagctgagattacagtcacatgccaccacacctggctaatttttgtatttttagtagagacagcgtttcaccatgttggctaggctggtctcaaactcctgacctcagttgaggtcacccgccttggcctcccaaagtgctgggattacaggcatgagccaccatgcccggcctgagaattttttattgtcacaattggaggggagctactggtatgtagtaggtaccagataggaatgctgctaagtattctacaattcacagggctctccctcccccagcaaagagttatctgactcaaatgacaatagtgctaaggttgagaaaccctgctttagaagaagttcagataacccaatggctccttctgcattggaaagctaggggcagttttttgatggttgagacctgagaaattccctgcactctcaaatttggaaaacaaaagccatatgttatgagaagttggaaggcacacagaaatagtaatagtgggaatcagatgactggaaacaagggtcagatatatagatatataaatattatatataattatatataataattatataataaattaataataaatattaataattattttaaataagtatatatatgacccttgttttcagtcatatatatattatatatataatatatatatttcaaatttcaggatcattatgtcgctaagtccttcatttgaccttccctaaggagaaacacctgaactcattactactaacacctcccaactcaattttagaaaacaaatagtcccctaagttgaaatcaagagggaatacctggaaacaaatgtcgttgcagagcctccttaaatttgtggacttttatgggatatccgggactttttcgtgcagatgaagctgatgaaatcaggcaagagttgtagtctgtgaccaaactgggaggagctagacaattacatggaaagttgtttcagacaaaaaataaaaagttaaaaaaaaaaaaaaaaaagcctctttttttggctcttcttactggagacctgtgatgtgcatgggtgcctgagcagtcgtacttactatgcgtcagacagctcacgtatgtcaggaaaggaagtctggggattcctacaggggacatatcacacatattctaagtcactgtgtgactcggcttgagcaagtcatttcacctctctctcacgctggagtgaagtaataatccctaagcttcctttcaattataatattctgactccaggttatctctaagaagaaaaggcatctagtggggatcagcaaggattaaagcacagtattttaaaaatggtgttggccagatgtgatggctcacacctgtaatcccagcactttgggaggccgaggcaggcggatcacgaggtcaggagatcaagaccatcctggctaacacggtgaaaccccgtctctactaaaaacaaaaaaaattagccaggcatggtggccggcgcctgtagtcccacctattcgggaggctgaggcaggagaatggggtgaacccaggagacggagcttgcagtgagccgagatagcgccactgcactccagcctgggtgacagagcgagactccgtctcaaaaaaaaaaaaaaatacaaaaaaatacaaaaattagctgggcgtggtggtgtgcctgtaatcccagctgctcgggaggctgaggtgggagaattgcttgaacctgggaggcggaggctgcagtgagctgagatcgtgccgctgcactccagcctaggcgacaaagcaagaccctgtctcaaaaaaaaaaaaaaatgttgttacagttgtttatgtccccatctaaggttagatggaatcaaaagtggcaggatctttaggggagaggagaagagaagtgaactcaaacaaattaagagaaagaatgacccaataaaattctccaatcactcaagttttgatgaaatctggaacatactggccgtgaaggcaagcagataggcgtagttcggcctatagtcctttatggattgattaggaatcaccaaggctgattccaatcaaaactgaaaggtaagtgagaacaccaggggtcctgctccccccagcacccccttgccctagcatctccttttgcatcattttcccccacttggtggtgccctaagcccagtggcttaaggttattagctcctaatgttactgaaacaattcaaatttgtcaacaatgttttgcttgaaagaattagtggagtagtggagtcatttatttttatttttttatttttatttatttatttttttgagacggggtctcgctctgttgcttaggctggagtgcagtggagtgatcttggctgactacaacctccacctcccaggctcaagcaatcctcccacctcagcctcccatgtagctgggactacaggcatacaccaccacgcctggctaatttttatatttgggggagagatagggcttcgctattttggccaggctggtctcaaactcctgggcttaggcaatctgcccaccttggcctcccaaagtgctaggactgcgcccagcctcagagttattcttaaacagtgtttctctagaatatcatctctaaaatgaggctattccaattttgactgggatgatcagcctgcacaattttttcaacaggtttatagacaataaaaggagacctttcctaactcattgctgatggcatactgtaactttcctttaaaagttgcttaggctggccaggagtggtggctcacacctgtaatcccagcagtttgggaggtggaggtgagttgatcacttgaggttagaagttcaagaccagcctgggcaacatggcaaaaccccatctctattaaaaatacaaaaattagccgacatggtggtgtgtgcctgtaatcccagctacttgggaggctgaagcacgagaatcacttgcacctgggaggtggagtttgcagtgagccgaggtcacaccactgcactccagcctgggtgacagagtctaaagaaaaaaaagttgtttaggccatagaatccaaacatttcttgacctcagtttatattctgagtctttggaactaaaaatgttagataaggaacactgtaatgggagaacacttataagaaaaataaatttctattttttaactaacatatgtgatcaaatacccacaaaaggcagagaaaggggttcctccctgctgatggggacaatgacttcacttccctttacctgactgagtatccagcatcatgaccacccactgctcagctgtcagccgtgtgacagaattgtctttcatgatccaggaatctggggcctctgcaaacaccacgcaacagaagggctccacttgaatcacacagacataaccatccaggacatctttttggtacacattcaggatttttgtagtgaaatttacctttggcttctcacagcagaagtggaatgtaggcaatttttctatgcagttttcgatttctttttttagtaagtcaggattcactttttcccacttacatccaaccacttctttgctcttatcatccaccccaatgaggacatatcccccttgagtgttggcaaatgcagaaacataatgaggcagcatttccttaatccgaggtatgacttttttggtggtgaaccttttaaattcaacatgtgttgactcagtaaagttgagtttctccttatacatgagtttgtcctttttaaaaaattctgaggccaatatcctcatatcttcctcttcctgaatgcatctattgagaacctgctgaggatgcaacttcttcacccttggtcttcctctttgggctctaaaccccttctctctgagaagctccagggcactgctagcactcaagttgatagcagaagtcacatctctccgatacaaattggagcgcaagctgcaaatccttagtggaaggctgaaaacatctgggctccatgacttcacaaaaatcaggagattgtgcccctgctgcatgtagtcaaggtatttctgtgaacctgaaggaaggagcttttgaaaagaagtttccaaatcctgtcccagcccatggcattggtaactataggttttatcatcaatctctgctttgatcacaccacctccagaatttaacagtgcacatatagcccggataattctagaattctcagatcttttcaaacagctgttggtcatcttcttcctgttttcttctccaaaaatcactctgcccacatctactattacctcaggatacggcatttcagtatcagtcttgagactctccatttcagcagcccctctgtgctccaaacaataaaagaaaggagttcctataatcaggacagaaatattgtttctatattaataagaattccaaagattacaatattttcttcaaaactatcaattactggagatatattttaatgttggaagtcatctctctctatatgtatatttgttgttgttgtttgttttgggttttttagttttgtttgtttgtttttgagatagaatcttgctctgttatgcaggttggagtgcagtggcacaataatagttctctgcaacctcaacctcccagttcaagtgattctccaacttcagtctccctagtagatgagactacagacacgtgccaccaagcctggctaattttttttttcttttttgttcttgctattttttttttttaagagatggagtcttgctacgttgcaatcctcctgcctgggcctccctcccaaagtgctgggattacagatgtgagccaccgcacccaactggaaattatctttgatactgctgttttctaatcactttgccaaatatccttagccttgccagaataagtaggcatggataaaggtgaatgcctaatatttgtcataatggaaaaattaaattgctaacattttcagccattttgcatttcaaatcaggaaacgccaacactgagcccagatataaagggcatgggttggcacaggagcccaggaaggtattggagaatatgcagaaatagaagttgaagtgagaagatgctcttatttataattcaaaaggggaagaaaggaaggcactagagaactaaggaagtataattttacagtatatgtactgtagaagatcttgctataaacacaaacataggctgggtgtggtagctcacatgtgtaatctcagcactttgggaggtggatgtgagaggattgctttcgatcaggagttgagaccagcgtggacaacatagcaagaccccatctcgacaaaagataaaaaaaaaaaaaatgttaaacattaggcaggtatggtggtgcgcacctgcagtcccagctacctaggaggctgaggtgggaggatctcttgagcccaggagtttgaggctgcagtgaaccatgatcgcaccactgcactccagcctgggcagcagagtgggaacctgtctaaaaaaataaaaataaaagtaaataaataaaattctatatttttatgtattatttcatacactttgaaaagctttattttactcctgaaagaatgtcagttgataccaaatgcagaaaccttttcaactcttcacatgttctaaatctcaaaagtacattgcctcatatacagtgtgatgtgacagcagcattttccttcccttctaatagttctgccctgtgctgtggaaacccctaagacttggaaaagaacatgagcttttggggcatggtaactaaaccattgtcacccttcttttgcttcctagaccagaaaacagccacctaaactgaaatttgagctctgaaacaaatatttcagaaaagatctgcttacctttagtcaattgcaaaacaaaatatttgctaactcaaccaaaattcttcctctaggagaagagaacccatctttctgtgtgatctttgcaaagcaggggccctgtgggcattgtatatactcaccaagaggaagaaagcaggcatccggcaagacatgtgcactcccctgatatcaatttgttcttggttgccttctcacttccttcaggaaaaccagaatcaacctggggaattctttttagaatgtgagcctcttctataggtacatgtaaatgtagtattttatggctccttagggaaatttcccataacattctatttatatcatagaatcacagaagtgttggaaaggactttaaagatcctccagtccaacaatctataggattctaaaatctcctctataatattgccaactcccaacaagttgcaaacctccagcaatgagcaactcactacctatcaaatagtccctctagtcccttctaatttctgacgtctgtgttagaaatggtctccttactttaagctgcaatttgtctccccataacttccactgatgggacccacaaaacaaatctaattgattttgaatagcaaaccctatggtctcgtgactcgtaagtctcatcaatgttatttgaatgctgataacaattatgataaatacaacatttactgagattctagctcgagatgaatatcctttccacatttcccaggacttttttttctttttttgagacagagttttgctctgtgcccaggctggagtgcagtggcacgatctcttggctcatggcaacctccgtcccccaggttcaagtgactctcctgcctcagcctccagagtagctgggactgcaggcaagagccaccactctcgatacatttttgtatttttagtagagatggggtttcaccatgttggccaggctggtctcgaactgttgacctcaggtgatccacctacctgagcctcccaaagtgctgggattatagggacgggccaccacgccaggccttcccagaattttttattcattttcctttacaaattttccctaaatactattttactaatccctcatgccctcagatgtagactgcacctaaaattagataaatgagatatttttaagaatttttttttttttttttacctatgctcctgtgtttcctcttgctgcttcagtttcacatctggctgtagtctgaatgtttgcttctgtcacagccccttttgccctttgatattagcctgggaggagcagacttcccacttcttcataacactgacatactgaggaaggccgataaggactcatgaagagcctgtgacagggcagattagcaggccagggtctgacctcagggagtgaatgaggtcgtaatgagaaaatgcaggggtgaatggaaaaagttaaacttagcacttctaagagactgagcttcatttccacatatcatacatgtaccttcagcgctggaaaattgtgtgtgcaaagctctgtttttattttaaattaggcttcctgtacatattcattgtgggcaatattaacctatttcattacctcctaaatggcttgttcttttctatttatttttattctttttcctacttttcatctttgttaaacacaagacccagcctagaaaaatcctcatagattaggagctggcaatccctgggtaggaggattaaaggtaattttttaattaatttatttttcttccctttattatctttaactgatctgtatttttaatggtttacaatgagtataaattgtttttcataattaaaaaacaaatggtaaaaaccaacagatgggctgggtgtggtggctcatgcctataatcccagcactttgggaggcctaggtgggtggatcatctgaggtcaggagttcgagaccagcctgaccaatatggtgaaaccctgtctctactaaaaatacaaaaattagcctggtgtggtggtgtgtgcctgtaatcccaactactggggaggctgagacaggagaattgcttgaacctgggaggcagaggttgcagtaagccgagatcatgccattccattctagcctgggcaacagagggagactccatctcaaaaaaaaaaaaaaaaaaaaaaaaaaaaaaagaaagaaagaaagaaagaaagaaaaagaaaacccaacagatgctgggggcagtggctcatgcctgtaatcccagcattttgggaggctgaggcaggcagatcacctgaggtcaggagttcaagaccagcctggccaacatggtgaaaaccccgtctctactagaaatacaaaaattagctgggcatggtggtggacacctgtcatcccagctcctggggaggctgggacaggagaattgcttgaacctgggaggcaaaggttgcagtgagccgagatcatgccactgcattccagcctgggtgacaaagtgagactccatctcaaaaaaaaaaaaaaaaacagataccgggcgcagtggctcatgcctgtaatcccagcattttgggaggccgaggccggtggatcacggggtcaggagttcaagactagcctggccaacatggtgaaaccccgtctctactaaaaatacaaaaattagccaggcatgatggcagacacctgtaataccagctactcaggtggctgaggtaggagaatcacttgaatctgggaggtggaggttgcagtgagccgagattgcgccactgcactccagcctccagcctgggagacaaagcgagactccatctcaaaaaaagaaaaaacaaccaacagatgggaggcagtgagttatcttatttgaggatggtggctaaactgggtcaagctttgatacacacaaaaggggaggaggcaatgtgatcacagaagcagagatggagtgatgcagctataagcaaaggaatgccagcagctaccagaagctggaagagtctcccctggagcttctggagacagcaggtccatggcaacactttttttttttttttttttgacagagtcttgctctgttgcttaggctggagtgcagtggtgcgatctcggcttactgcaacctctgcctcccaggttcaagcaattctcccacctcagcctccagcatagctaggattacaggtgcgcaccaccatgcctggctaatttacatatttttaatagaggtggggtttcgccatgttggccaggatggtctcgaacccctgacctcatgtgatctgcctgcctcagtctcccaaagtgctgggattacaggcgtgagccaccgtgcccagcccatgccaacactttgacttcaactcagtgaaactgatgttgaacttctagctgtaaaaaaaataaaaaatttaaaaaaaaaacgcaaaaacaaaaataaccaaatgaatggagctggaggccattatccttagcaaactaatacaggaacagaaaactaaatactgcatgttctcacttataagtggaagctcaatgatgagaacacatggacacaaagaggggaacaacagacactgggacccacctgaggtgggaggagggagaggagcagaagaaataactattgtgtagcaggcttaatacctgggtaatgaaatgatctatacaacaaacccccgtgacatgagtttacccatataataaacctgcacatgtacttctgaacctaaaataagttttcataaaagaatatgtttctgggccgggtgcagtgactcacgcctgtaatcccagcagtttgggaggccgaggggggcggatcacgaggtcaggagatcgagaccatgctggctaacgcagtgaaaccctgtctctactaaaaatacaaaaaattagccaggcgtagtggcgggcgcctgtagtcccagctactcgggagtctgaggcaggagaatggcgtaaacccgggaggcagagcttgcagtgagccgagccgagattgcactactgcactccagcctgggtgacagagtgagactccatctcaaaaaaaaaaaaaaaaaagtttctgttgttttaagccaccaaatttgtggtgatttgttgcagcagccacagaatactaatacacctctctccctctaaatcaaaccagcaaagtactctgtatctctacttcaattcgtttatgatgaaacgacattcttaaataagtctctggacatccctatttttgtcgttgttgttagctgacgccactgcccaacgaagttctgctctgctggcatcactctttgtacatgtttggcttaaaaggagtttccaggaaaggaggcagaatgggtactatgatatataattcacacagcaacataataagctccaaaggcctgctctcagctttaactcatttttcattcgtgtcacttctgaatccagtctcacttttagttctcctgtctaccttaattctcggcctcactttcatattgaaatccctctgatattacttatgtttcaaaggctaaaaatgaccaccatttactaaaaatgtgcttaccagatgcaagggaccatgctgggagcactacacatcacacaaaaactgagactatacggccagagagtggaagagtgacgatcccaaactaggtctgtctaattcaaagacttgtactctttcactctttcaagtttgggattctggattgcttgaaagccctcaaaatcagaagtctaagtacctccccattttcttcccaatcaagaggaataacatcatttggtcaggagaactagaaactagattgctgttttcttcttcttcttctacagggtagtactgggaatcaaatcaagagaagcggggaataacgtggaaaatgagcaatgagaacttcttttccttcttcaaagcgttttagtcaagtcccttggatatgaatagttaggttgtcaggccagggaggacttcacatcttggctttgatagctcccaagcaaatgttcctgatacaaaacaacttgaaatcagtaacttagattatgctttttcctgtctcaggaaaattcatctggccatgctattgatgattgctaagaacaagaaccccgaatttattttagatgtgtttattcactaagcatttctgtttatccacagttgtacttatgttcaccagacgcaagcctgcatgttcaccagacataaactgtcaaatagcaactaaaggggaaaagttggtctctttacccccagatgcctccatctcacccccaattctttcatagagatgatccaaagagtgtaaatagaatagtgaccaagggctccattatgccactacctgactccgtgtaagtttcctcactttcattcattctttcattcgatcagctattttggggatcctaaggtgttcagatctcagctctgccacattctagctatgaaaactttgttaaactaacctaagcctccaatttcttctgtgtaaactggagataataacagagcctcctccacagagtatttgccagaatgaagtgaaatgatacacataaagagtaaatgtgtgttaacatgtgctctttgccgcatatggtgcccggcatgtaatgccattttcattcaataatcaattgtcggctaagcgcagtggctcacgcctgtaatcccaccactttgggaggccaaggcaggcggatcacttgaggtcaggagttcaagaccagcctaaccaacatggcgaaacctcatctctattaaaaatacaaacattagctgggcatggtggcatgcgcctgtaatcccagctacttgggaggctgaggcatgagaatcacttgaacccaggaggcagaggttgcagtgagccgagatcgcaccactgcattctagcctgggtgacagagcgagactctgtctcaaataataataatgataatcaattgttgagcgcttacaatgttttaaacatggtgctacaatctggggctacccatcaaaataaaagctcttatttagtaactgccttccttgagccaaatatgcaactttccttctcaaatataatcctcagaataacttgcaagaagtgttattttcacattacataaatgaaaaaaactgagttcattgaggtaaagcacaaagttacacatctagcaagtggcagagctgagagctgaacactgacctatctgaatccaaagcccagttactctcatcctgccagaaagccttactattagctggaagaataagacacacgtccctgctgggctcggtggctcacgactgtaatcccagcactttcggaggccaaggtgggtgggtggatcacttgaggtcaagagttcgagaccagcctggccaacatggcgaaaccccatctctactaaaaataaaagaatcagccgggtgtggtagtgcatgcctgtaatcccacctatttgggaggctgagccaggagaattgcttgagcccaggaggcaggggttgcagtgagctgagatcattcacaatctaaagagggaaaacatgtactaaacaactcataacaatacaacatacacaataacatcaactgagcactctatgtattaggcattgttgtcattgatcttgtaacagttctattaggtagatgctattattagcctcctttttacaaatagtgatactgaagaacaaagaattcaagttacttgccaaaatagtccacatacatgaccactacgctctagtaccactctaaagagtttgcaatgtatgagcagtgttctctaggtgttctgaggagtgacaataactatgagtgagcatcagaaaagatttcctagatgagatgatttgtgagctggaacctgtaagtaagaaagcaacaggtttccccctctcttcctttctccgccatcgtggtatgtgcttgactctgcttcttgccatgtcttctcacaagacgtttaggattaagcaattcctggccaagaaacaaaagcaaaatcgtcccattccccagtggattcagataaaaattggtaataaaatcaggtacaactccaaaaggagacattggagaagaaccaagctgggtctataaggaattgcacatgagatggcacacgtatttatgatgtctgaaggtcacaatcacattatcatatcaacctgaaaatgtcaccactatctggagagttggacatgttttattggggacatattttttctctctgaatctgttatgaacgctttggttggctgagttcagtaataaatatgtgagacctttcatttcaaaaaaaaaaaagaaagcaagcaagcaacaggttgagagaaagggagatggatgggagaaagataaaccaggtagaggaaatagcacgcgcaaaggcacattgtcttcactgtctaatctctccaatccttaacgaacgaaagaggccttgagtgggtctggtacagaagactctccattttacttcttcatgtccttttacccattcctgtctaacattcatcacaatcctcattcgcctttcatatgccactcctctatttccactgccaatctaatttaagctcctattagctctcacctggaccattgcaatagctttccctcctttcgctctctgccccccaccaatctaaacacagttgaggccgggcacggtggctcacgcctgtaatcccagcactgtgggaggccgaggcggtaggatcacctgaggtcaggagttcaagaccagcctggccaacacgttgaaaccccgtctctacaaaagtacaaaaattagcccggcatgatgatgggtgtctgtaatacagctactcgggaggctgaggcacgagaaccgcttgaacctgggaggcggaggttgcagtgagccgagatcgcgccactacactgcagcctgggcgacagagcgaaactccatctcaggaaaataaataaataaataaataaataaataaataaataaataaaatcagccgggcgtggtgacgcctgcctgtaatccaagctgctcagaaggccgaagcaggagaatagcctgagcctgggaggcggaagtggcagtgagccgagatcgcgccactgcactccagcctgggcgacttgagtgagaccctgtcacaaaaaaaaaaaaaaaaaaaacccaaaaccatttcttcccgcaatcccagggcacacacactataatcctgcctcaaatgctcattcccagttatgaaacagggtacaggcaaaaccactctgcctaacagtcaccccgacggccgacggcgaggaattgtggagggggcgggggagaattgctcagaacttggaaagcgactggtctctcaggatagagaccgcgacgcaaagaagtgacggaaaagatgcgtccgccatcccttttgctccacccctgacgttggcctcggccttcgattggctgctcctcccaccagccccgcctcaggggcgcccacgtgacccgatggccgccgtgggattggttgttcggcgagagccgcgctaggctgtaagacctgagccgggcggagaagcaaaggagagggaagctggaagcacctttggcccgggacagaaatctggagagcttggctacctccatcctcctcaggccggagcaggcttcctgagagagtccaggtcgtaggagttttacgacttagaaaagcgggctgcagattccttcctgggtgtttggttcaagccttggctccagcctcactctcagtcttcccgggagttcgtgggatttggaccttagattattagtattattttgagggcctcctgtgtgtaagcactggttgtgcgcagatggctgtgcagagggccatgaggtagaggctggggaaatgagggcttggaggtgcttgaggtatggtctttacctacgtgaaatgttggaggtaagtcggatttataacttgtgttgatgcttttataatctaggagcttagggtttagtaggaagagtcgctcattcaatgaattaaacgctcattcctatgtactaggcaccattccgagtgcagtggctacaaagactagtagaacatagtcctggttctttaggaactctgtgattgggcaagtgggagagagggcggaaaacgtgaactggtgagtagttggcgtgtgatgcgtgccgtagtggaagaaagtgctgtgagagttagaagagggggatgattgaaggaattaaggacatttaacagaaagtgatatttgagtaaagtttatttttgttttgttttttttttttttttgagacgggagtctcgctctgcctcccaggttggagtccagtggcgctatctcggctcactgcaaccgccgcctcccgggttcaagcagttctcagcctcagcctcccaagtagctgggattacaggcgcacaccaccacgcccggctaatttttgcgtttttagtagagatggggtttcaccatgttggccaggctggtcttgaactcctgacctcgtgatccacccgcctcggcctcccaaagtgctgggattacaggccaaagccaccgctcccggccttgagtaaagtttaaaaagtatacttagggtgggtatttatccctccatgaaagcgccttttactcagccagcacagagccatccctttgcccttccagatgcctgactgggaccttgcttatggatgtgtgagcttttaatctctggctgtaatcttacccacttcaacctaaacttggaatgattactcttgaccctttttttgagtgataaggcaaatctccccacacctgggcattttaaagttatatactgtatgtttaaatatcccccttaaaaagcctgagctatataacaatctagatgtgtctatcttactcttttcccacaaactaagaatccaaataatgttaaaaatctttaaaaaaaaaaaaaaaagtatactcaggttttctccccatcgaaaggggtggagaaagcactccaggaactaggaaaatgtacctgccgcatgtggctggagcacatgggaggtttgcccagctgatgatgaagcagatagggagttcaacttgtaaagatcttgaattacatggtagtctggctgtctggatcttaaaatacaaagtgaaataggtaccacaaaacaggtattaaggtgctttcataattcagaaggaggacagatacttcctgttggattgatgaaaaaaggcttcatgcaaaagatggcattttgaagggttgcaaactgcagggataggattttgaagtacaggaaggatttctacacagggggaaagactttctagatggagggcataaggtcaaatagagccaatatgaggactaaggaataatctgggttgattagactgtaagatatgtttgggggcccggcacggtggctcacacctataatcccagcacctgggaggccaaggcaggtggatcacttgaggtcaggagtttaagaccagtctggccaacatggcgaaaccctgtctctactaaaaatacaaaaattagttgggcatggtggctcatgcctgtaatcccacctacttgggaagctgaggcaggagaatcgcttgaacccaggaggctgagtttgcagtgagctgagattgcaccactgcactgcagcctgggcgacagagcgagactctatctcaaacaaacaaacaaacaaaagacatgtttgggttatttatggtgtatttaaggataaatattggtctgttttgaaacatcttgattgctaaacaaagtcgttaggactttatttcctagactatggggagcaactgaatgcttgtgagtaatcacacctccatatataagggttagtatgtgtgtaagattcaaagtacattggatgggagagaaactggaggcaggaggcccattgagatagcagtattgtctgccagaaggaacgtgggttttagagccaagcactcattggttcagagcttggctttgctcacaagtttcattatttttggcagatttatttaagttattaagctctgatctctgtctcaaaagagggaaagtaactgatgaagtgcctgttacacaatggttatgcttgaatgcttaaacagaggctgaggcctctgttttctttttctttctttctttctctttctttctttctttctttctttctttctttctttctctttctttttttccttctttccttctttccttctttccttccttccttctttccttccttccttctttccttctttctttctttctttttctttctttctttcttttttttttttttttttgagacaggatctcactcttgtcgcccaggctggagtgcagtggtgcaatctcagctcactgcaacctccgcctcccaggttcaagctgttgtcctgcctcagcctcttgagtagctggcattacaggcgcctgccatcatgcccggctaatttttgtacttttaatagagacggggtttcgccacgttggccaggctggtctggaactcctggcctcaggggacctgcctgcctcggcctcccaaagtgctgggattagaggtgcgaaccactgcgcctgacctagttttcctctttatggagcttagttgctgaatagtgaacacagaccaatagctgtcagttttaactagggaatatcagtctattgatgtttatagatggctgaaggcagtatatggtggccccagaattttagatactgacaatatcattttgaaagtctggagaggccaggtgcggtggctcatgcctgtaatcccagcactttcagaggccgaggtgggcagatcacttgaagtcaggagttcaagaccagcctggccaacatggcaaaaccccatttctactgaaaatgcaaaaattagctaggcctggttgtgcatgcctgtaatcccagctacctgggaggctgaggtgggaggactgcttgaacccaggaggcagaggctaaagtgagctgagatagtgccactgcattccagcctgggtgacagagtgagaatctgtctcaaaaaataaagaggccaggcgcggtggctcacgcccataatcccagcactttgggaggttgaggtgggtggatcacaaggtcaagagttcaagaccagcctggccaatatggtgaaagcccatctctactaaaaagtgcaaaaattagctgggtgtggtggtgcacgcctgtagtctcagctactcgggaggctgaggcaggagaatcacttgaacccgggaggtagaggttgcagtgagccgagattgtgccaccgcactctagcctgggtgacagagtgagggagtggagtggagtggaggtcaggtttctcattcacaaattgatttttcagattgtgaattacccatgctttgccctgctttatcttccatgtccttcctcattagtaaatctaaaggtagtaccctagagaaaaatgaaattgaaccttttatttagttgctactgaaaaaatataaatctggtaatcatacctcaagttctctttccagctctgcagttaatttcctatggatcttcggcaaatcatagcctctctgggttcttggactcttcagataaaagattctagtttaaaaacttttatgactataattttaatctttgttggcagaagaattataaatcaaattgcatattaaatgaactggagtttataaagaaatttagtagaaaatcttttctaggcccggtgtggtggctcacgcctgtaatcccagcactttgggaggccaaggctggcagatcacttgaggtcaggagttcaagaccagcctggccaacatggtgaaaccccatctctactaaaaatacaaaaattagctgggcgtggtggcacatgcctgtagtcccagctatttgggaggctgaggctgcagtgagccgagattgcgccactgcactccagcctgggcgacacagtgagactccatttcaaaaaaaaaaatattttctaggccaggtacagtagctcacacctgtaatccagcactttggaaggccaaagagggaagatcacttgagcccagcagtttgagaccaccctgggcaacatggcaagactctgggcgtggtggtgctcacctgagatgtcagctactcagaaggctggggtgggaggattgcttgagcccagcagtttgaggccacagtgagccatgatcgtgccactgcactccaggctaggtgacagggcaagaccctgtctccagaaaaaataaagaaatttttaaaaagaaaatatattttctaaagcttttgcttttgaactaggctaagggcaggcttatgggctcaagcctgtgatcccagggttttgggaggccaaggcaggaggatcacttgaagccaggagtttgagaccagcctgggaaacataccgagactcttgtctctacaaaaatttaaaaagaattagccagggatggtggacatgcacctgtagtcctagctacctggttggatcacctgagcccaggagtttgaggctacagtgagccatgatcacaccactgcactccagcctggttgacaagagtgaaaccttgtctcaaaataaaaatatatatatatattaattgaaaacaggccaggcatggtggctcacgcctgtaatccgcgcactttgggaggctggagaaggtggattgcttgagtccaggagtttgagaacagcctggacaacatggtaaaaccctgtctctacaaaaagtacaaaaattagccagatatggtggcctgtgactgtagtcccagctacttgggaggctgaggtgggatgatcgtctgagcctggggaggttgagactgcagtgagccatgatcaggccattgcactccagcctgggtgacagagtaagaccctgtcttaaaaaaaaaaagaaagaaagaaatattaattagaaacccatggttgaaacttacctgaatagaaggctttattttttttcataggtaagcctatgttttcttggatgtgaaactagggcactgggttgctcttaggtaatacaaggagatgaaatgcagcgatgcgatgatgagtgaagtagagcctgacctggtattgccattgcttcactgttggctttgaccagggtatgatctcttaatcttctctctgagctgattctgattgtggtttttccacacaggtgtgttgtatcctgtttggacactggttttattatgtttaagatgtttcttttattttcttttgaattactgatattctcatgttttcctccttaggttgagatgaaaactcttgctttgaattcttcatggaggactacatcatttcaatcctgaatctggctcaattctattattcacttattactgtattaaaaacgtttaattggccaggcacagtggttcacgcctgtaatcccagcactttgggaggccaaggcaggcggatcacttgaggtcaggagttcgacaccagcctggccaacatggcaaaaccccgcctctactaaaaatacaaaaattagccaggcgtggtggcacgcacctgtaatcacagctacttaggaggctgaggtggcagaattgtttgaacccaggaggtggaggttgcagtgagccgagatcacaccactgcactcaagccttggcatcagagtgagactctgtctcagtaaaaaaaaaataaataaataaaaatgtttaattaaccatgatatttgctttggtaaaacctttgaggtttaatgagaattttaaaattcattatacttttcttatggcatataaaagttttaattttttttattgtctcaactaacatcataaatgtcttaatgttaaaatccatgggatattctatttaaaattttagctttatcacctttgtgctatcagagaatgtgctttgaactggtaaaatgagttaaagtattggaaaacacttatgtcagcagaggctcttaaaaatcattttcatccttcctcttctagtgatgatttttttttaacccatgttttcaccagtctaccaatccaatggcataaatgctcctacataggcaacttaagtgtttcttaagttgatgcaaggtattttgcatgaggctgaattcttgttgtcggagcagaggatttttgttccaactactgaattggcaaaatgttaaatataaaaacacctcaaaaagtcaaaggtagtctgaatgaaaaatttattttaaacacctcaagtaatctttacatttctacaaaatcataacatagttcttttccagaaacatttattcttaaaatctacttaagtgtttcatagaaactttagtaataaccagaataattcatgacactttagcaaactcttagcagcaagcagaaagaacttattaaaatatcctttctttacacaattagattagtattttgcttcatgtcttcattgcttgttagctttgcttttacacaggaatcttcagactactctctgtaacactcaacccctattccttttttaaccagtttctcaagaaggatatggagagctcataaaggaatatcctcaaatatcctaaatatccaacttttaaaataccttttttatccttaaaagctgataaacaatagatgtcacttaacaaatgtctcacagtatatggaaggagcttttttcccccccagagtgtttctaagcatttctatcaagagcaagtctgcatttcttatcgtttgcaaactgatgaaatttccaccttacagacaggcaggtaaatgctttcttttctaaaaagaagtcttgctaccacctcactgttcactttattttttatgcggtctaacctgggtttttcgtaagagctcctttatttcttatattttaaggaaagggataggcaaaaacttgtgtactcattattctgtttaatctctacactggccctcatatcccctgccagtcctgatccttctactttaagcagcttggtcaactgtaagtagggttctagagagcaggctaaaaggttaggatcaaatgggcatatccttttaaagaaatccatataatcatttaaagttcatatagttatgaattgaggctgagaagtgtcaactcaataccatgctgaaaccagctctgtgacattacagcgcaatacttttgttgtgaggataagacatgattccctttcagttctcaggggagtagagtttaatcagatgttgtacttctgttggataacctgtgatgggacaagcttggtgactcctcacataatgaaacacacagcggtaacaaaacacatagccagaggtggcaagaacagtatcattcacccgggttttacgacacagtgggcacacagtcttcattttgggtaagaggggagaatcagagttatagtctaggtgtacaggtggtggtggagtaggcagggcagtcaatgacttgatggtttcttgattttcagatgagtaccaccagtcaaggaactgcaagaagaatacacccacagaaaggccagtagacagggataaggcaacacccccaacagctttcttcagagctgagtttatcttctcactaacactgttgggagaaaagaacaaggaggcaaagagagaaactttatttaggtatcattacaaagtgactaatataaatgcaattcttacatttttcatcagaatcactgggggactgaatggttggtagactggtactatctccttaaggatctattctaagtgattctaacttacaatattttaggagcataggagctaagctttgtttttagtaacatgattagggtttggttttgtgttttgaaagataaatcagagaatttgattatatagacctccctttttttagtggaagatagtgatccagaaaaaaaaaaaaaaacccaattcacttaataaaaaacttagcagtattgaggaatgtatatatttgaacttgtaggagaacacaaatatgaactagaaggagcacagcatcatgattaagagcacagtcttaggctgggtgcagtggctcacagagcacagtctttagaattgtattggtttggtttgaatcccagctctgccaccttctatgtacctacgtgactttggcaaggtacttaactgcttgggtttagtttcctcaactgtgagctaatacatttacttcattgggttgtgttgaggattgagataatgtacgtaaagcaagcacctagcacagggcctgggacatagcaagtatgcactaaagtatacctagaatgatgaaggttaccaggatgacagtccttgttttatggacacaaggaatagcttttctatgactctatgaaatgccacaaagttaacagggaggtgaattttacaaaactgggatacgattttcgaatttactaactaaagatcttttggaaatgttaaggccttacctcctggctggttgctgcatcatgctggccttagctggtttgtgctccagagcttgtatatcctgaactgtcagtcgacctagctgaactccagccagcctcagcagtggtgagtgatgctgagcttttcctaggatgtatcgaagttgttgtacaagaaaccatccttcccaggccatgttcacaaatgggtaggctgccaggaaagctctgtaaaatcgtttccagcgggaagaagggggatgaatagaatattcatcctcttctctcaggctagaaaccagcttctccagcttcactttcagatagggaagaagaaccaggaacataatagatttccaaagctgctgctttgggagaccagcactagccaatctctgagacttgtgagtgtcccccattacaattctctttaagccgtaaaagttttcagaaaatgaggcactggttctagacagataatgttgctggagcagaagatctagcagagtaaagatttcatcaaaccacctccacaagaagccatagtgggtgggatttgattctgcaagaacctaaagcaaaataaagcaataagtgaaattcattccattacacaagttctacacctatttacattcccccttttcctctaaagtctacacaatttgttttaaataagtcactgttggaccctgaaatgctgggtattcagtacaggtctctacacataacagagactcagtaactcttaagtcatgggatacaagttatttgcaaattggctatttcaaacgctaggctaccaaataagcacaaattattcgtttgttttttacccagttgtccctaaaacctttccaagaattaataccttaccttgaccacatgctgaagagcgggtctcactgctgtcattaaactgtcctgtgctaccacctcaaagatggatggctggtcatcggccacagaagcagctgtgaagtgagccccgtgctcagccatagtttcctgcgtgtactggctttcacttttcccacaaactctctcgtgagcatgaactttttcgggaggaagagtatcagatgggtgctcagtcttaaaggtaaactttctgcatgatatctgaaactcgaaactcaatcttatgggcaaaaatgaactgggaaaaaaagacctggaggccgagggtagtctcaagaaggttaagaacaaagttaactcggacgtgggtggaagtagtatgtggcgagggggtaacttgtcaaatgctgcacgtcagggcagagcgtgactgtgggggacaggtatgggggaaggaacgcaatcctctggagctgcgaaccagaaacgccccctcctccccaatcgtgagagctcaaaagccagccgactctgaggattcagtcgtgccactgtgagcccgggacacaagggctgactccagctgttggctttgagtatccccgcccgcgcccgtccttgctcgctgaccccaggcgaggcgcaaacaacccacgacgccacgtttgaagggaggtctccgctttatgacagaagccgcacccggaaatgaaaccaccaggacctctgggatgcctggcggaagagaggcgctctagttccgaatgcggtccggaaaccagaactagagaactctatgacccacctgagcttccgctcccgccccgctgaaacagaagagggcccttgtgggctggttttggctagtttggtttacttttcgtagctgggtctgcatggtagcctcgctggaaagctacagctctgaacctctctctgcgaggtctttttgacaagctgtttggggcaccgcgcagacgtctggcgccgggagccagagctcgggcccgttgctgagccctgtgttcctgcaggcgatgaagctaggggcggtgggaggaagggaatctggaggtggaaaggactttgctgtacgcgtgcggcagggatggtggttaatttatatgtcttagccttccagaaatgatttaaagcgacatagcaggagataggagccttagatttattgccgccaattataaggaaagatgattggattgagaaaggttcatgcttgttcctcagtacttgagacggttaattttcatccaagctggtagtttaacgtcttccaggttttggctatattcaagcataactgcatgcacttgctatactggatgaaaatggtctccatccttgaacacagttgtatatgtcaccaccagcgatatgaatacagtactaacgcagagggagctttatgaattgtaactagcatgcactggggacacttgacagaaagtttcctttcatgccgtttttataccaaaatgaatgtgatttaccttaaggtttgtaaagtgcttttatgttatgtacagctttgtctcgctgaagttggctgacacagccttattgaatttggatgagagttccacctctcctcccttcctctgggaagtgccacctctgggctaaatagctgggaatagaaggtattgtttactgccctagaggcccttatgttataaaaataattggtttgcataatgagaaccctcaaaaacaaggtttggatttagttattccaataggagagaaaaccttacaaattgtccttaattatagttataaaaagtgttttttactctaccaaaagacattatattgatatatgatttttaccttacagagttttaagactagacatagtttatccatatgaagcacctggatacatattaggtgcttgtttaatagtaactgttatgtacaagcttttcttaagtgaatagcaaaaatacaaagttgagaggtagcatcaactaaatcaagcaggaaattaaacatttttgtcacttagggatctttggttacaagcaacagaaacaaacaggctaatttaaactaaaacggaatttattagaagtgtatggagtagctcacaaaataagtaaagccagccctgaaagaacaggaacttaacaatactattgggactgcctaacaggaattagaagttcttatccaggcaacgttgttgcagtgaacgagcttccaccaatttctgtttgtgactctgctcgtgatacaaattttgactgacctctcttggttcaagttccctctccaccctgtctttcactcttagccaggggaaggcaggatgtcttgattgatagtcccatggaagtactccaaaagttaactaaacgtatggcataagaacgcctataatcccagcactttgggaggccgaggcgggtggatcacctgaggtcaagaggtcatgaccagcctgaccaacatggagaaacccagtctgtactagaaatacaaaaaattagctgggtgtggtggcacatacctgtaatcccagctactcgggaggctgaggcaggagaatcgcttgaaccctggaagcggaggttgtggtgagccgagattgcaccattgcactccagcctgggtaactgagcgagactccatctccagaaaaaagaaaagaaaaaggaaaggtagggcctggtatggtggctcatacctgtaatcccagcactttgggaggctgagacgggtggatcacgaagtcaggagtttgagaccggcccagccgacatggtgaaaacccatctctactaaaaatacaaaaattagcttggaatgatggtgcatggtggtggatgtctgttatcccagctactctggaggctgaggcaggagaatcacttgaacccgggaggtggaggttgcagtgagccgaggtcacaccactgcactccagcctgggggacagagtgagactctgtctcaaaaaaaaaaagaaaacagaaatttgcaactcgaataagaggtctgggaggcccaaatcttttagacgtgataatcggaatgcccttctgaggacataacaaaggcctaaattatgaggagccagccatatgaggagttggggaaaagaatattaggcagaaggaagagtattgtgaagaccctaaggtgggaaagagcttggtgtgtttgagggctattataactggcaaaaggtgaaatgatgaggaaatgagcagtaactgaaaagcacaaaatgatgttagagaggtagacaggccaaaccatgcagggactcacaggccatgggaacaaccctggattttagcccaagtgcaatgggaagccaatgaaggattcacacaccagagatgtgtgatcaggtatatatataaacaaatatatatatatatatatatatatatatatatatatatatatacaaatatatatataatatatacaaatatatataatatatatacaaatatatataaaatatatatacaaatatatataaaaatatatatacaaatatataatatatacaaatatatataatatataataaataaaatatataaatatataatatatatttatatatttgtatatattatatatttgtatatatatttgtgtatatatacatatattaaaaaatatatatatatatatttttttttttttgaaacagagttttactcttgttgcccaggctggagtgcaatggcatgatgactcactgcaaccgccgcctcctgtgttcaagcgattctcctgccacggcctcccaagtagctgggattacaggcgcccgccaacatgcccggctaatttttgtatttttagtagagatggggtttcaccatgttggccaggctggtcttgaactcctggccttgtgatctgcccaccttggcctcccaaagtgctaggattacaggcgtgagccaccgtgcctggccaggtttatatttttttaaagatgtctctgatggttttgtgggtatgcagtatttatatcaagctttacatttatgatatatgcacatttttgtttttgtttttgttttcttgagatagagtctggctctgtagcccaggctggagtgcagtggcacagtctcggctcactgcaacctccacctcccgggttcaagtgattctcccacctcagaccccccggagtagctgggactacatgcatgtgccaccacacccggctaatttttgtatttttagtagagacagggttttgccatgttggccaggctggtctcaaactcctggcctcaagtgatccccctgcctcagcctcccaaagtgctgggattacgggtgtgagccaccacatcaggccagatatgcacatttttaaatgtatgttatacatccaaaaaagttaaacaacctggccactacgtggagaatggtagagagaagacttatagccttctaatagtctaggcaaaaggtgatggtggatttatgagattgaatagagggagttggatggcttggagttgttgttttttttttttttttttttttttttgagacagtcttgctctgttgcccaggatggagtgcagtggcgcaatctcggctcactgcaacctctgcctcccgggttcaagcagttctgtacctcagcctcccgagtagctgagattacaggcgcccaccacaacgcctggctaattttagtagagacggggtttcatcatcttggccaggctggtcacgaactcctgactttgtgatccacctgccttggcctcccaaagtgctgggattacaggtgtgagccacagcgcccagctacggctttgagattttaaaggtagaattgacaactggagatggattggatgtggcagttgaaggaaagggaaatcaggaatgacccctaggtttctggcttgagcagctcagtgcaatttattaaaataatcacaattacaggaaatagttccatagtccatgctatatgccagccatagttctaagtgctttacatttaatttatttcattgttcaatattatgattagatgttactatcttcctccattttatagatgagaaaaccaaagaaagcacatagatggaggaaactgggggaagaatagctttcaaacatgttaggcaatgagaagttgatgaaagtttttgaacagcagagaggtatgaatcaaagctcttaaatatttttctttttctttttttttccttttcctttttttttttttttttttttttttttttttttttttttttgagatggagtcttactttattgcccaggctgcagtgtagtggtgtgatttcggctcactgcaacctcctcctctcaggttcaagtaattctcctgcctcagcctccctagtacctgagactacaggcatgtgccaccatgcctggctaatttttgtatttttagtagagtcagggttttaccatgttggccaggctgggctcaaagtcctgacctcaggtgatccacctgccttggcctcccaaagtgctgtgatcacaggcgtgagccaccacggccagcctcttgaagatttttctaatgacatctttacgaaatctacctctgtctgctagcagttgtaccttgaacgagttttttctctctctctctctctctctctctctctctctctctctctttctttttagagacggtctcactctgtcacccaggctggagtgcagtggcatgatcatggctcactacagcctcaaactcttgggctcaagtgatcctcccacctcagcctcccaaagtgctgggatcataggtgtaaactgctgtgcccaactctgtaaccaggtttttctaacctcctccattccttatgatttaacccagcagtatagttatcgatttggtgatgaaatttggggaataggtctaggctagagataagagattttggagccatatatgtaagaaagataattaaaaccatggtatgctaaagggttagtgtagagaaaatgtatgagtatagaactaaacttgaaaaaattggctgagtttggtggctcatgcctataatcccagcatttggggaggccaaggcaggaggatcacttgagcccaggagttgcagaccagcctgggcaacatggcaagaccccctctctacaaaaaaagaaaattagctaggcgtggtgacacatgcctgtagtcgcagctacttgggaggctaggtaggaggattgcttgagcctgggaggtcaaggctgcagtgaattgtaatggcaccactgcactccagcctgggcaacagtgcaacaccctgcctcaagaaagaaaaaatccttgccactgttttcctcagataccatttctgctttctttggtcatactttcttatgagttatctgcaactcctgtttttatttcctcatttctaatccatcctcaaacatctgcagtatgacttttgccttcatatctctactgatttctcagcaataacatcaaatacctccatgttactaaatcctgtagacactttttagcccttctcctgtctatggcaactaatattgttgatcacttatttatgcgtttagtcaacatatattaatttgtgtgtgtgtgtgtgatggggctagcctcatgtgtgcaagagtgaacagattggtatagtccctactttcatgaaactctgaaaacatcctaaaatatactattctgcttttcctcctacctctctgactactccttctcagtcctctttgcattcttgggtttatctgtttctaccccaagcactcactctccacattcttcatgaataatgttcatgcccacagattgaattatcatctgtatgctcacagttcacaaatttaactccagatcattccttatcttcagacacatataatcaagtacctcttgggtagagatcttcactctaacctaacgtataaaatgaactcatcacctccctattcttccccaaacttctgccatttcttatattttcctattttcagtgactagtaccaccgttcctcccttgccctaacctaaaacataagccttatcagccctagtgtcagacttcctgggttcaaatcttaattctacctttgtgtgtgtgtatgtgtgtgtgcgtgtctgtgtgtgtgactgcaagctccgccttccaggttcatgccattctcctgcctcagcctcctgaatagctgggactataggcgcccgccaccacgccctgctactttttttttgtatttttagtagagatgaggtttcaccatgttagccaggatggtctcgatctcctgacctcgtgatctgcccgcctcagcctcccaaagtgttgggattacaggcgtgagccaccgcgcccagccatcttaattctaccttttaacttctctgtatctcttaaaatagaggaagtaatagtacctacttggttatcaggtggtgcggatgtaaaaatgtacttagcagagtaactgacataaaatcataataaatatcaacagttatttgtttaaaccaccatcatcgtgtggctggatcatgtcaacagtttcctgagtggtctcccattagattatgagcccgtgatggtcccaaaaggtgaaaagaagggagattggtccatactttcacccaaaagtggaagagaatgaagttggaaaagctttcggattgatgctatattttgaaaatagtattggttcatttttccttaaaatatatgcatttttcagagaaaggaatggaaaataaaacaaatataaagaagataacatttgtaatcagcacccagagggaaccactaataggtatatatactcctctggatttagagttttgtatctttttttttttcttatttcaaagcatttttctgtatcatatttttcaacaatatgatttaaaaggcacatcccaacatagaaataaatacatgttcattgtagaacactttgaaaaatacagaaaaatattaggaagaaaaataaaactctcactatcctgcaataaccacttttaacgttctgctgaatatccaagctttttttttttttttttcttttgagatgagtctggctttgttactcaggctggagtgcagtggcgagatctgggctcattgcaacctctacctcctgggatcaagccattctcctgcctcagccgcctgagtagccgggattataggcgtgtgccaccacccccagctaatttttgttttttcagtagagacagggtttcaccacattggccaggctggtctcaaactcccgacatcaggtgatccacccacctcagcctcctaaagggctgggattgcaggtgtaagccaccacgcctggcctatcctagccttttttttctatacatatatagtcatactgtatactgtattgtttggtgtcctttttttgcttaacactttatgaattttctgtcataaaatattctataacattatgcagctatctgatttaccataactgtttgcattctctcaccttatacctggctttctaatttcccctattcccctattttaataacagaggaaataataatacatgagtatgttatacaaaattttaatgtacttctgatcacttttttaagaatgaagttttaaaatactgaaacactttttgactcacagagttcataggcaaaatgtgagaaaaatcatcactttgctctccatccttccttacaccctgaaattaaccttagggacagctagttcatttaacatcatcaatcttgttctccagttccaggtcctggaatctagctcttagtgtccgaaagaaacttacttttgtgtaagcacacctattatatactaggcactttacctaatttatctggtttaaacttcacatgcccgagagagatactatcattgtcttcatttcacagataagaaggttgatgagacattaactgtctcagtcacattcagggtagggattcaaactcacatccaatgcctcctcaacctcttttacgtgcagcactatcctctagccccactgcccgtatataggcctgggctatatcaccattgtccgcccttgagcctggaaggaaaatgagctgaggggttttgttttttcagaaaggaacaggatatttcatcatctctatgtttacgtttttcagagaatttctgtgcgaggaaacaaatccattgtcagctttttaaaatatatccctttggagtagccacttaacatcctctgaggcccagatgggctagcttgccgggaccaaaggaaatctttgggtctggaaggcgacaagagatcacaggctttctaggtctaccgcgcaccccgatgacgtcacgcggcgacgttctctgacgtcagagtttcctgcccaccatctttgtccctggcaaagtgggttttgcgcagtggcttagacctagaaaagaatcgtgacgggcaggaaaccattacaccaccacctgggctgtgctctccggctcccgccgccacccccgccctcgccttcgcctccgcctccggtgagttcagggcggttgcctttagggtgtgtccctaattgacggggtcggggacggagagaagggtaacaccaggctgggtcggagaccggcggaggcgaggaaatcctaagagcgtgaccgttgatgatgcagggaaccgtcgggtgtgaccattgagagggaaaaggttggagaaagggtctctaccatgatgcctgtggtgcggtgagggaatcctcgggtgtggcagcaggtagttgggggcaggaggggaagatgtgtttcggaattgagggtttagggggaccagaggccaggggtgtggctgatagagcctggaggccgtggggggaaccgtctttcttccccgctcggcgtcgttcactgagaggctgagacgtgtccagcaagccaaagggaaaagggattccctcaaaggtttgctcattgatgggcgaacgtcgtctctcgggtaacttgagggtaagagacaacctcttccctgctccgtaatggaggagcatatcgctagaatcttgaccacctggggaaagaagaggcattccttactcttggaggaaggaaagagtaacctccagaattgacccgatgtaagagagggggaagcaaatgggggcaaatcttaacccagcatcttttttttttttttctttttctgggctctgcagtaatggtctggtttgggaaaggctgtagattaagctgaaagtaaagaaactggaacgtcctgttatttccttatcatttgaatccaaatcatttgttcatgctgcttgttttcaagagtagtcttctattggaggggtggggtggggggggacaggcctttattgaactcacgcggatgcttcattaaacttttgacttttattttattttatttttgtatttttagtgacagggtcttactgtgtagcccagtctggtctcgaactcctgggcccaagcgatcctcccgcttcggcctcctaaagttttgtgattacaggcgtgagccagcgcgcccagccaaacttgacttttgagaagaaaaaatgttttgaaaactgccaaagacttatcataaccattgtggtttaaaagaaagtaaatgcattaagcttagaaaggcagaatgactaagaaagaaggtggtctcaatgagaatcaatttaaatgattagttaccttccttgtatacttcaattgcttagcctcagggtacacttacaaagtagtaatagaaagcagcagatgaaggaggtgcagctctataagaaaacgtgttaagacattccagtgatgactaagcgtgctggtaaggtgagaactgtttgcagtatcttagccgttgaaactttcaaggaagcagaaaggatgatgtataatgcaaacatcctcactaaaagctgggtggtaaaatcaatataaatctaatattctgactgtgtatgaagaaactcaaggaagtccagttctttcattctttctttccttaaaagatccatattttgaaatactaactttttaggcacaggtttgaacgaagctgagcaaggaatatattaaatagggcacgttctcctttctcttgtcctttctttccttctagccttaggttttccagagtttaatgttattttggttaagaattagatgtaaaacttttgaactcctttgcttcgttataatattaagaagctactttgtagtctgttatgtttaaatagaaatcacaggtgattttagcttttgtgtctcataatttcttatgagcaaggtaatacctgatgatgctattgtctttgcattattactgaatatttgattagaaatgaatttggcacctctcacctttataataaaagattactggaatgacatttctgctttataatttggttaactttggccagtttttcactatgagcactgagctttgtaaagtcccactttgtgaaaagaagggtttagtgactttacaaactaatttagcttcccagagagccatttgaattaagaccctattaatttttttctgaccttattctacccaaggtattaatcttattttgctgctcagtttctcttttggggaactggagggagatataggagaggagggactttgacaacctatatttggtagaaactaggttatgttaaatctggatatatagtcctgtgcagggaggccttctccgaaatgcagtgacatcacactctggtcgagggcaagtaagagtgattatgtgctttgactctggcagctttgttgtttaacagtggccttaggccataccgtaaatcctcagaacagccgttacttgtctggtttgatctggtagaaaggtagtgtgagttcaaattccatcatggctttgcttatttctctggctcttctgaaggaacattttctccccccataggagcagcttgatttttgaggcacttcagcaaatattagattttttttttctttagctctattttgtttactttttctgtaacttctttttttttttttttttttgagacggagtctcactctttcgcccaggctggagtgcagtggcgcgatctcggctcactgcaagctctgcctcctgggttcacaccattctcctgtctcagcttcccgagtagctgggactacaggcgcccgccacacgcctggctaattttttgtatttttagtagagacagggtttcaccgtgttagccaggatggtctcgatctcctgaccttgtgatccgcccgcctcccaaagtgctgggattacaggcgtgagccaccgcgaccggctgtaacttctaatgaagacgtcagtttttgccatcctgtattttggagactctggctatgtccatatctagcatgtgattaagtgtatctctcattatatgaggtgagaactcattatatgagagatacactgaatcatatatatatgtgatttttttttgaggtgaaattcacgtaccataaaattaaccaggttaaggcatacagttcagtggcatttagtacactgacagtgttgtgcaacaatcatgtcttctgatttgtttttatttacactattttcatttttcttggagtttcttttggcttaaggcaagaaccagcttggcaccatgtttctctgccaatatggttagggaatattttgttactattgtttacaatatggttactagagtgatatcccttctctttagagcagcagggactcttaatttagaatctatcttataggcttctaaagatacttgaccctcctctcttccctgaaattttgtgggtgggtgcattattttctagttaagacaagaacacttaatgctcacagtgaacaggatagtaatatattccttgacattgaaattgttaggggagataatgaaatatgtgagctactgataaaggtatgacttaagacttaggttaatttattgtttaatagaatgtagtgaaaatgcctgttaagaatttactcatgcctgtaatcccagcactttgggaggccgaggtggatggataacttgatgtcaggagttccagaccagcctggctaacaaggaaaaaccctgtctctactaaaatacaaaaattagctgggcgtggtagtgggtgcctgtagtcccagctactctgaaggctaaggcaggagaatcacttgaacctgggaggcaaaggttggagtgagcccaaattgaaccactgcactggagcctgggccacagtgagattttgtctcaaaaaaaaaaaaaaaaaaaaaagaatttaatgggctgggcacggtgatcccaacatgtagtcccagctactcgggaggctgaggcaggaggattgcttgagcccagaaggcagatgttgcagtgagtcccagctgggactacaggcatgtgctaccatgcccggctaatttttgtatttttattagagacggagtttcgccacgttccccagactggtctcgatctcctgagctcaagccatccgcacgcctcgtcctcccaaagtgttgggattacaggcgtgagccaccgtgcctggccaaaaaaaatttaatatgtgtatgtataagaggcttttcagagaaattgggtgacaaattctaaggaggttttgttttaaaatcttaaacaagttttaaaggacatagcatagcatagtaaatatcctagacagattgtaatggatttgagctatagtccttctttgaggctcaagtaatcgtttctgtttactggtttttctgtttgtatatatacattcataaataacttcagatttattccaggtcttttatgtgaagaattcctttcttcatttgcccacttcacatttagtttacattatgaatggactaaatgattataacattctttgaatttttgctagaaacacattgtaaaaacattgcataaggcaagcttcagtataatttttaattataacaagtattaaaggagaaatttctatattctgtaatgatatttgtgagtcctagctcacttcttttaacaagatcattctgtgaatttctggtacaatctaaagagctattaggatcaagactataaatagtaattagctggttggaaagatagcaaatgagtctaatttccattaaactgtacaagtagcacgttttagagatcagatttgaaccagaagtttttcattattttatgtttatctggctcttttttcttttctttaattacattgatttgtttggtgcttaggtcttttctcctagatccatatttactattgtttgccaaatacattatgtcatattgacctgataataatgagcaggtgccagcatgtcttgtcctgaagttggtgataagtattattagtgatggtgataaggaaaaagatactcattttgagtacagaaggaatattattaaaaaatatatgtatatttatatatttttttccccttgagacaaggtctctgtcgctgaggctggagtgcagtggtgagatcatagctccctgtagccttgatctcctaagctcaagcgatccacacacctcagcctcccaagtagctgagactacaggtacatgccaccatgcctgagccaccgcgcctggcccaaattcctatttatttatttatttatttgagatggacttttgctctgttgcccaggctggagtgcagtggcgtgatctcggcttactgcagcttccgcctcccaggtccaagcgattctcctgcctcagcctcccaagtagctgggattaaaggcacgtgccaccatgcccagctaaattttgtatttttagcagagacaggatttcaccatgttggcgaggctggtcttgaactcctgacctcaagtgatccacccggcagcctcacaaagtgctgggattacaggcgtgagctactgtgcctggccccaaaattttaatatatttaaagaagtctggtacattggacaaagtcttatagtttctcaaatcagaaaaagtagtcttattatttagtaaaaatgtgaccagactgtgccgtttttgttagtagagccatttgtcatctggattacttcttctggaaattgggatggaagagttaaggttgaggttgagatccacgttcttttgtttcaacaccagtttgattctcgtgtctgaacggatgtctcagtcttttgccttgtttttaactataaactggcattatttgggaatactcttgggctaaatctggattgttggaagtaagaaagccacatttttttttaaatccaaaaatatagttagatacaatgaataagatctagtatttgatagcacaaaagggtgactgcggtcaacaataatttactgtacatttaaaaataactaaaagaatgtaattgaattgtttataatacaaagaaaggataaatgcttgaggtgatggatatcccatttacactaatgtaattattatgcattgtctgcctgttatcaaaatatctcatgtacctatacgcacctactaaatacccacaaaactaaaaattaaaaaaattccatgcataagtcatggttgcctctctagatgtttgttgtgaaagaatattgtcctactaattttgaattttttttttctgaaagagattctttttattgaaagtttcatgtcatagatcggcaaaattgttttttcttttgaccttacactgcttcagaatatatgttttggagtgattccagcttgaggcaaggaagttaccagattttcctgaatggaaagtaattgcagatatatttataaaaaggtccagctttagctcttgaaagctttgaggagttactgtggataaaatcacaaagccataataggttcatacttttacccagttgcatttggcctttagatttttgccccattagcttgaggagttacattcttagtttttcttgaaccatcaacggtggtgataaaggaagatgatactcatttttagaaattcttaaatataagtgttcctaaaattaattggatgttcttaaaattaattggatgccttgttggatatctataacctgaatgaaggaattcttttctcttgctataggtgcacattaaagatccaaagtcatgactgactccaagtatttcacaaccaataaaaaaggtaagtatgagaatacaatcaaatcttttgaaattttcaaaagttgtagtgtaagattgccccaggcagaatgctgctgacctcttccttcagacatacatgtagctgacaatctcactggacatctactacttctatagatgaatgtattcaagcaagttattaaagagtaggttttaaaagagagggctgtgatgcacattattatgacttgaaggttctgtttagtgaaagagactcctctttgctgtttgagatgatccattggagattggttaagtgtgaggaggacaaaagaagcagcatactttttcccttttattaaataatttttacttggaaataaacattttataacaaagaatacaattaaagcaatacagatatgtatgtaaaaggtaaaaatgaaagttctcccttcctgttcctattcccaagggaacttggtgtatatcctcaagtctttttctctgcatatgagtgcatatattaatacatatgatttaaaatttttttatctttaatgaaaaagcaatcttgcaaaacaatgaatagaaatgagttattttcatatccgtccatatacatctaccatgttcttcgtctagatgtatatttaaaacggaatctctagagccatctatggtttttaggtcatagacggaattacttgagggactttgcacttattactctcatcatctttgttatcagtaatataatgcttgtttttacctatgagtttgggtctaggaacaaaggattcttctggggaaagtccaacccttcatcttttgtaaaattgttcctaaataaaatagatcatttctagaaatgtggagggtcttcccatcaaagacaaacattttagcccatctcagcttattgtgcctgtagcttagcttgctttatttgttgcttaggatcagaattctgtgcttttgtgttcaggagtccttacatttaccaaagtattccagacatggcgccaactaccattcttctttttctcttgttgcagtgagttgcttaattatgtcagtttgttgtctgtagctttcagtcttggcaacacatcagaattgctcagccagggaactttgaaataatactgatgcctgggtctcaacctcagcctgatttcagttgtcctggatatggtctgggtgtgaggattttaaaggttctccaggtggccaggcatggtggcttatgcctgtaatcccagcacattgggaggctgagacaggaggattgtttgagtgcaggagtttgagaccagcctgggcaacatggtaagaccctatctctatgaaaaaaaatttaaaaattagccctgtacggtggtgcacacctgtagtcccagctatttgggaggctgaggtgggaggatcacttgagtgcaggaggttgaggctgcagtgagtcgtgattgtgccgctgtaccccagcctaggcaacagagagagaccctgtctcaaaagaaaaaaattaaaaagaaagctccccagattattttaatgtgcagccatgattgagaactactgctagctgctaacagtgcttggtagatttgattggggggaggaggagggagaaaatataggaatttaataaagttgtagaatatatgactttgcctcttttagtacccctctttggtcctgcccaactttttcctccttatttttattacttacacctcacaaaagccattagccacttgtcattcagtctcagctttttctgattttcttttggaaatatgtttatttcttcttctgttagcattttgtgtgctttgacgaacaaaatgtctataattatataaagggatacaattacaattaaatagttataattttaaaactctcctaattcttcaaacctactcttgaaaagtgtcctggtgacctttttttaattcaggcatttgtaaaagtttgagactgcagattgaatcactgctaataaacatcatacttaaaaaaaattgatagattgtgttccctgtacttcctgcaacacccaccagaactgccactgaaacatattctttaaatttatgcttttggaattggaataatttctgttacatcctgctttgattctataacacctgctgctgttcacaattcagactttctgaaaccccgccgtttgtccttcactgttcccggaagtgaatgagaggaactctaagagctggatttggcaggatgggacatggtgaagagtcctatgaagaatgactctttaaagggcccagcttttcttgctatgctacttttgtagctgttgattaaatagaaattttggaacaatttttttgccttattggccatggatattgaaacgaaaaagtgctctacttctgtgtcttactaatttcatcctttccacataatggtttcaggcaaatcacgtagtgtttgtccccactatttctttcttttttttttttttggaggaggggaggtcaggttttaatgtcccagtcctcgggcgccgtcatcccgcgcctgccaggcccggcggccatgtcgctcactcgggtggcggccagcctgcctcatcagggccttccgcggaggccgccccgtcgccctcgagcaccagcttcacgtccagctccagctgcccggtgtagaagcccacggcggcgcacacccagagcgggctggtggcgagtacagcgcccgcagctgcgccccctagcgtcagctgcatgggcccccgcagcgctgccaggccccgcaggcgctgccccacaccgcacacaggccgcccagcaggaagaagccatatgctgcttcgtgatccatgtcactctgcatgaaggagataaccccgatgccctatgccaggaggccattgtggaaccaggagaagaaagctgtctcgtgcgcctttcggagaggagcctggcgcctgcacggtccagctcggacacaggtggcggcgaagccccgttgtgggggccgtggccgggggcgaaggacccctgggcgcccccgctccggggccactgaggcagcagtagcgacctccggaagcggagactgtccccactgtttctatgctggtaaatgagatctggttgaaaggaacgacaggaacagtcttgaaggtggaggaaagtcttttgaggcagtatggtagatgagctggaggatgtagatggaaagttgagatgggagtagtcaacctctttttcatggacttagtgttttttttccgtttcttttaaacaatattagggttgttactttcttttttattttggttccggcttcttgcagataggtgagcctggagaccaggccttaaaatagtggttacagtccctgacagtttacagtgcggagcctaagcagtcattcaagattgtacctttggaaatgactccattgtgtaccattcttggtttcaagattattcttgtttgattgaatagcaagggccttaaagcccactgatttattaaagtactgattaaagtagtgattctcaacattgggtgtgcgttagagtcacttggtggagctcttaaaggtataaatatgagttctctttgacattatgatttatttggcccagagtggagcctgtactttgctatatttagtatttctcaggtaatattagtgtgtggccagggctgagaacctttgcattcaagagtcaggagacacagtgctaagcccaactttgtcactgactctgtgaactttgagcctcatttcttaatctgtaaagccgagcgtgggtaaatgaggtaatacgcgcctgctccctacctacgtttatgttctcctccagactttaacattctgatggaagatcatccttcatatactgttctctccccattgtagctagatataatgagatttggtttttcccactcttgtggttcttgaagatctggattgcaccttcctctctggccataatttaaaagatttttaaaacttactgatggcttccttgtcagtgagtcaggtaatattctagggctttgaattttatatattctataattttaaaatcttattttagttgctgccctgctatcctggtattggttattacatagtgtagtattctgctctaagtctgtggtactggaaccttaccagtttgctctcatctcttgcaggagaaatatttgaactaaaagctgaactcaacaatgaaaagaaagaaaagagaaaggaggctgtgaagaaagtgattgctgctatgaccgtggggaaggatgttaggtaagagtaatcacccttgccattgatcacttcagaggtccataccccatcttatggcctttactgcttttcctttaaaagtatcataatcatagaacctctaagaatgggtttgtcccactaaaaacatcattaggaagtgcagttgcctttgtattaatgctctactttttgtttgtttgtttgttatggggtgtgtgtgtgtttgtgttagaacagtgaaacgagtttgatttcattgcattcagatctagcataacacctcctgagagctggcacagttacaaatctttttgctgaggtcgttttagaagatgataaaaatacactgagaagcataagttcacatgatctttaactggctcaagccactgccctcaactttacaactgtacattcaattgctggattcaagatgaaaatcaatgttaaccaaatccatgtagtcttattttttatttctgtaattaagaccatttggaaataagtaaggactatatgcaggcccctaaggattatcctaagaccctttcggggggtccgtgaggtcaaagctgttttcataataatacttagatgttacttgcctttttcactatttggatgtttacagtgatggtgcaaagcagtggtgggtaaaactgctggtgcctcagcatgaatgaaggcagtggtgccaaccataatggtagtcattgtattccttaacaccatgtgctaaaaaagagcagtttcacttaggaatgtccttcatgagcagtaaaaatttgttttattaaaacttgaacctttttaatattgtgtttgatgaaatagggattacccataaatctcttctgctgcgtagcagtgcaatggtcgacttgagaaaaaacccttgtgcagttgtttgaactgcaaacaccatttttatgtgaaagaatgattgacagacaaactatatttaatcagactttggtatttgggagatattttattcaaaaatgaacaaagtgaacctgtcacttcaagggaaaaaaattgacaatggatacgtttcaggttttaaagtaaaaaattagaattttggaaaatttgtatctcccatcataagcttgacagcttcctaatgcttaaagacttttctgaggagattggtggtgaaattaatgattgtgattatttgctgttttataatgaaatgtgtcagcatagctcagtgaaccaatatttttccaaatgaccagagcatatgtatatcacaaaattatgcatggataaaagatctattcgaaataaagtgtggaggccaggcgtggtggctcacggttgtgatcccagtattttgggaggccgaggcaggcggatcacttgagggcaggagttcgagactaggctagccaacatggtgaaattctgtctctactaaaaaaaaatacaaaaaaattagccgggcatggtggcatgtgcctgtaatcccagctactctagaggctgaggcagtagaattgcttgaactcaggaggcggaggttgcagtgagccaggattgtgccactgcactccagcttaggcaacagagtaagactctgtctcaaaaatcaaaaaacaaaaaaacaaaatagaatgtaaatgaatggattttaatacaatcaagtacaaaaagtttatcgatacggcttcagattctatattgcaactaacttttaagaaactacagtgtgtggactcagaaagaggaaaacaaccatttgtctagttttatttatttatcattattttttttgagacagagtcttactctgtcacccatactggagtgtagtgacgttatcttggctcactgcaacctccgcctcccaggctcaagcggttctcctgcctcagcctcccaagtagctgggattacaggcgtgcaccactaccacccggctaatttttgtatttttagtagagacggggtttcaccatgttggccaggctggtctcgaactcctgacctcaaatgatctacctgccttggcctcacaaaactgctgggattacaggcatgagccactgttcccgggctgtctagttttagtgtaacatcaagaatttctagttataacaaaaaaaaaaagaaaataaggaatatgtagttatatgaaaaagctattaaaatattatttccttttccgagttatatacgtgtatgaagctggattttcttcttatatttcaaaacaacattctacaaaaggttgaatgcaggaacttatgagaatctagctgtttttatttcaagtagatattaaagagagttgcaaaaaaataaaaaagcagtgtcaccatctcattaatttaaaaacagtacattttacctttaaaatgttatgaaatgggtttattcttattttaatggattaactttttaaaaatttctcagttttaattcctgacatggtaaaatatcaataggtatataacccacatgaacaaaaactctttgggatgtcagtaatttttaagagtatgaagggatcccgagaccaaaaaggtgagggctgcttccctaaccagacggggagcccagatagaaatggcagcgtaggaaatgactctgtatcttctcttgctccaggtgctgctcttctgaggtgaatttttgttatttttcttttgtttgttagcacataaagcacatttggtttttaaattgctgtcctgtgaccatctatctaaggagttggcaaacgtttttgtaaaggacaaaatagtaagtacatcaggctggcatagtaagtactctttgcttagcaggcaaagaggcaaaattgagtttggtaggtaggtacttacataacaagagagaagacaaatttccacaaattttttattgaggatattcaaaataaaataatagttaagtataatgttttgtaccacaggtatactattaagtgggattctttttgggggatgataacattttgcgtaattaggattcatagtatttttcatcatcagatttgttttatttatttattgttttgagatggagtcttgctccatcactcaggctggagtgcagtggcgcaatctcggcccactgcagcctctgcctcccgggttcaagggattctcctgcctcagcctcctgagtagctggtactgtatatgcacctgccatcactcctggctgacgccaagtgatccgcctgccttggccccccgaagtgttgggattacaggcatgagccaccatgcccggccaagattcatatagatgaacacttagttcatctataaaaaccacttttagctcatggattgtacaaaaatccagcattgggctagatttaacccacaggcggtagttgcctatctgtgatctgtctagtcactgaagggctgtttttgccaaagaataaatctggattgaaaacatcagtacaaacgaattggtaaaaattgtcataactcttttttttttttttttgagaccgagttttgctcttgttgcccaggctgcagcgcaatggcgtgatcttggctcactgcaacccccgactcccgggttcaagtgattatcctgcctctgtctcccgagtagctgggattacaggcatgtgccaccacgcccggctaattttgtatttttagtagagatggggtttctgcatgttggtcaggctggtctcaaactcccgaaaaattgtcataactctacaggggctgttgtggttttgccaagcttatttctgtatcctgcagaaaagttaaaactcttgatttttttttatatgcttgctattgctgatactttattatgtacttagcactataccacttatcattattcaaacaaaaggctagtggatgtctgtttgccttcatgatttttactgtctagttgatgaaacccaaaacttgaaaaattagggaaaaataaaatatacttatgtaattaggcactgaagtgtatattttaaaggcaatacgagttctaccaaagagagatacaggttaacaggaatagttgaagaacccttcttggagatgaaatatgagctgtacttagaaagatagtgcaaagaaataaaatggagattagctatttgtagattgtgatatttcagcctttcctgcaagtaacctcaagtgcagcactggccagtggaaatacagtgtgaaccacatatgtaattttaaattttctaatagccattttgaaaaaatgaaaaggaacagatgaattaattttagtaatacattttatttgacccagtatatctaaaatatcctttcagtatgtaatcaacataaaaattattaatgagatattttacattatatttttcatgctaagtcttcaaaatccagtgtgtgtttcacatttacatcacatctcagttcacactcgccacattgtgtttagtagtcacatgtgactagtggccaccatattggaaagttcaggtttctagtttataggttggcacttaacactttttacttcttgcttgatctttggctattaagtcttcttgaccttgtgtagattgctagaattaaactatttaggatcttgaatttattattggttaatgtttaacatttactggttatcgttgttttgtgcatgagctagtctaggaaatagaaaacacatttttggagagtatttactaaatatctacaggtgcatgaaactaccgtaggtaccatgcatacaagtgaaacacatagtttgctttccaggacagaagttactggttcactggagatatggtggattctttgacctgagtccagcttcctttctgtgaataatttctacttctgtacccttttgtgtatataggaccattgtatataccctgtgaccagctatttcattcccttttttccccttattttccttgtggaaatacacctacatttgttttttctttcttctatgctagtagcaagatgtttagcagtattaaaaatgtataaggtactttgataaagcattgtggggaagatttattgctaacttcccataaagttacagttatcctatattgtaaagatacagcttacactttagaatctgacaagctcaacccttccaagctaatggtgctcctttaaatttgtttcctgtggcttataggagaatggtaaatcatgaaataactagaacttaggaaaggtataaactccttttatatttgattactctcaaattttcatttgtctgaatatgtaatgttaaaaaaataatttcactaaaagggaatcaggacatcttggaggatgactgattctaggtctggaattagaaatgtacaaaatgagcctggatggggcatcttgtcataaaggaaagtatggaaaataccaggtcatatcacaaggattcaggagctcagttcccactggtcaagactggaagaatatgaactttaaaaagcgtaactgaagtgctttgaaactgtagtagatggatatgaagaattattgttccttttgccctgtcgcactcctgaaagcaagatgattcaccagcagctctactggagccacccgcgaaaagtcagccagggttcttgctattgtgtctgctgaaactgggcacagtctgatctggaaattgagcctcgttacatgccaccagtgtttccatcatacgtgaaggatatagatttcattaagttggactaagtgatcttccacgaatggattatctaaggcacccacccaatgagagaaaccatgttagctttttgtacataaaataaatattttaaaataattattgttattttttatttttatttttgagatggggtctctctctgttcctcaggctggtgtgcagtggcatgttcgtggctcactgcagcctccgcatcccaggctcaagtgatcctcccacctcagcttcctgagtagctgggaccacaggcgcacaccaccatgcctggctaatttttaaaattatttatagagacgaggtctcactatgttgcccaggctggtctcacactcctaggctcaagcagtcctcccaccatggcctcgcaaagtgcttggattacagacgtgagccactgggcctggcttttttgtttttgtttttgtgtgtttttttgaatgtgataaaggtagtggaaaaaaaaaaagacacttgcctgtgcgtggtggctcacatctgtaatcccagaactttgggaggccaaggcaggtggatcacctgaggtcaggagttcgggactagcctggctaacatggtgaaaccccatctctactaaaaatataaaaattagccgggagtggtggcgcacgcctgtaatctcagctacttaggaggctgacacattagaattgcttgaactggggaggcagtggttgcaggaagcaaagatggtgccactgaactccagcctgggcgacagagtgagactctgtctcaaaaagaaaaaaaaggattcttaagatacacattaaaatattatagatgaagctgggcacagtggcttatgcatgtaatcccagcactaggattaacattttttcataataaaaagctttttctaaaactatagagaccttgttgagaacagcactacaatttttttcttgttttttttggatggggacaaggtctcactctgtcatccaggctagagtgcagtgacgtgatcatggctcactgcagtctcgacctcctgcttcagccttctgagtagctaagactacaggtgtgcaccaccacacctagctttttaaaacaaatttttgtagagaggatctcgccatgttgtccaggctggccttgaacacctggtctcaagtgaatccttacaccccagcctcccaaagttctgagattgcatacctgagccaccatgtctggcctacagtttcttttcttttcttttctcttttcttttctttttttttttccttttttttttagacacaggagtctcgctcttgttgcccaggctggagtgcaatggtgtgatctcagctcaccgcaaactctgcctcccaggttcaaacgattctcctgtctcagcctcctgagtagctgggattacagacatgcaccaccatgcctggctaattttttgtatttttagtagagacggggtttctccatgttggtcaggctagtctcaaactcccgacctcaggtgatccgcctgccttggcctcccagagtgctgggattataggcgtgagccaccgtgcccagccagtttctttagtaattcatttctgtgacagttaccactgtggggacatttgttcttgcatcaaatcactgttagttaaggctattcatgttctgtccaacagcttggcaccaacacctgcttactttccttttctcttttaccctctcttctcagttctctctttccagacgtagtgaactgtatgcagactgacaatctggaactaaagaagcttgtgtatctctacttgatgaactacgccaagagtcagccagacatggccatcatggctgtaaacagctttgtgaaggtaacttttcccaaggcctcaataacagagtttgaattgcaaataagtaacctctgttcacaaggaaggagtgtagggaagtgttggcaatgactaggaatgttcatgttttaagcattctgtataccagtgtgtgtcatccagggaaattcaaaccatgtgctgagctttctgttagtggggcttggtgcatccttgccagatgggtagaagaaaacctggtgaaaccccactgttttaccttctgaggctgacaaaggtgggcatatcattgtactatcagtaattgggggctttacctattttatctttgtagaaattatacttatgagtcagcagtagtggagactgccggagtttctactttcatttcatttaatacgtcttacatcatttgattaatttttttttttttttgatacagagtctcactctgtcaccgaggctggagtgcagtggcacgatcttggctcactgcaacctctgcctcccaggttcaagtgattctcctgcctcagtctcccaagtagctgggattacaggtgaccgtcaccatgcccagcttatttttgtatttttagtagagacagggtttcaccatgttggtcaggctgatctcgtgctcctaacttcaagtgatccacccacctcagcctcacaaagtgctggggttacggacacaagccaccactcccggcgtgattaattttttttaatggaaaattttaaacatattcaagaaaaaggactagtataataaattcctaaatatccgtcttgcagttttaacagttaccgacacataaccactcttgtttgtaatcctcatacatattttctgacctccaaccccctctcctgctggataattttaaagaaatcctgaacatcatatattaaatagttttgtctttatatttgtcaagataagatcttttatttaaacataaccacaatatcatcatgtctttaaaaatggacaaaatattttcttattattgaatatccagtcaaatctttcctatcatagatttaaagaaaataataatgggatcattcccattaatttttttttttttttggtgacagaatttcactcttgttgcccgggctggagtgcaatggcgcaatctcagctcaccacaacctccgcctcccgggctcaagtgattctcctgcctcatcctcccgagtagctgggattacaggcatgcaccaccacacctggctaattttgtatatttagtagagatggggtttcaccatattggccaggctggtctcgaactcctgacctcaggtgatccgcccaccttggcctctcaaagtgctgggattacaggcgtgagccaccatgtccagcctaatatttttttaatagttgttttttctctgtttggaacttagtgtacatttaaaaaaaacagacagcatttctaaaattagcttctatttaaaatgttttgaaaaataagcaatatgctttcttctttctcatgaactttttgttcttttcctgtgtttagctacattatagagtcagaacgtaacagtttgttctccatgactggtggttcatagagggaatatatcattgggaagaatttagtttacattttttggaagttagagttgtgcatagatttacatgggcttaaagacatttttttagtgtaaggcagtttaaaagagtgttctttctccatattctatttactatatttggaagcacttgctagtaaaagagaatgtatgttagccaagagctcagagggccttctctgctgcttaactccaggtacttatttcaagcccagaccagctcctgtgctcccctttgttttcttggctgcaggccacagaaatctagctctcttttctatttgatgtttaggaactcactgtggagtagggcacggtctttacagctcctcttttttttttttttttttttcctgtgccggaatacaagcccaaaagcttttcctgtttttagggtagatcctaatggctgtgggatggtacgaactccctaaacctctgcctggcactagagtgaatcctgctgagctgtttctcattttgtatttaaaacagttaaatgacttcttcacctaaactcttaaatagggcagctaagatttgtacttaggaaaggaatagcatggaagattggagctcatgtagaatgtatctggaagcttaaattaatgaggtaattcttttgcagcttacataaactggactgtttacttttagccaccatgtatacctacagttgttggtgattgttttctgcaggactgtgaagatcctaatcctttgattcgagccttggcagtcagaaccatggggtgcatccgggtagacaaaattacagaatatctctgtgagccgctccgcaagtgcttgaaggatgaggatccctatgttcggaaaacagcagcagtctgcgtggcaaaactccatgatatcaatgcccaaatggtggaagatcagggatttctggattctctacgggatctcatagcagattcaaatccaatggtaataagcttctgcttttacaaagagagcagtatttaaaatgagtcccttgttaaagcgtgtttaatatgaaccttgtctttggaatactgggttatggggtagctatgggaaacatgactttgtgtgtctcacagattgtatatttcatatcctaggtgtttttgaggtgagaaccaagtactaaaatgcagggatcttaaagcaaatctttgtattgtacttatgctcatatttgcccatattgcccatgatgaaaactttcatcattttcttcaggaggtttggccgtaaatttatatatatttaagattattttcttcagatcaatatttgtggtattttctggtggtgtgggactagaaactgaatgaaaatgatctttattacctaattattatcatgcatttctctataggggaatttctagggcaagattatttttagccaacttggttatgttgtaaatgtttagcagccagaacatagcttaacaccttaaagttttgggaccttttccttattgacattttaaactttgcttatataatgaagaaggtcaagtcccaagtgatatgtttgactccagtaataactaaagctcatttgaattgggtactaattgaatatattggatgggtcattaaatattgttgccaggaagatggaggaaaatagccactttctttaaagtgctacctttttggtctaatgcaatgtttactgaaaggtgcataacactaagagttaatcagtggataacctttgaatattcccttttaaaaattatttatctatctatttatttattttttacagataggatcttgctctgtggccaagctggagtgcagtggtgcagtcatagctcactgtaactttgaactcctgggttcaagcactcctacctcagcctcctgagcatctaggactgcaggcacatgccaccacatcccgctaattttttttttttttttgagacagagtcttgccttgtcgcccaggctggagtgcagtggcgtgatctcagctcactgcaagctccgccttccaggttcatgccattgtcctgcctcagccttttgagtagctgggactacaggcgcctgccaccacgcctggctaattttttgtattttttagtagagacggggcttcaccgtgttagccaggatggtcttgatctcctgacctcgtgatccacctgacatggcctcccaaagtgttgggattacatgtgtgagccaccgcacccagccttattttttatggagatggggtcttgctatgttgcccaggttggtcatgaattcctggcctcaagcaatcctcccaccttggccttcctcagtgaattactgtgcttggcctgaatattttcttagtgaactttaaatggagaattagaatttggctggacatagatgctgtctctcatttgtaaattacctgttcacttctctgctttgacattttgtttggttcattttattttacaggtagccttggcttctgtttattatccttcaagattagtattaaatccacaggatgaagcaagtcataattttttaaggtttttatggtagtaactaccattagaaatctttcaacctaggcataagggtgggcgtcggtgtgggtgtggaagtgcagatgctttaaccatgacttctgacagagcatcaccaccagtactagaagattcaaccctgccttttatttcccctaagtaacaccatatggtaccttttatttattttttatttttttttgagatggagtgtcactctgtcgcccagtctggagtgcagtggcatgatctcggctcactggaacctctaccttctgggttcaagcgattctcctcctgcctcagcctccttagtaactgggattacaggtgcccactaccatgcccggctaatttttgtatttttagtagagacgacgttgcaccatgttggccaggctggtctcaaactcttgactcaggtgatgcacctgccttgacctcccaaagtgctgggattacaggcatgagccatcacacccagccccctttttaaaaattacataaagaaattagttggctaggcatgttggctcatatgcctataatcctagcactttgggaggctgaggcagaaggatcacttgaagccaagagtttgagaccagcctgggcaacaaactgagaccctgtctctacaaaaatttttttaaaaaattcggtggggccgggtgcagtggctcatgcctgtaatcccagcactttgggaggccgaggtgggtggatcacgaagtcaggaaatcaggaccatcctggctaacgcggtgaatccccgtctctactaaaaatacaaaaaattagccgggcgtggtggcaggcgcctatcgtcccagctactcaggaggccgaggcaggagaatggtgtgaacccaggaggcggagcttgcagtgagccgaggtcgtgccactgcattccagcctgggtgacggagcgagactcttgtctcaaaaaaaaaaaaaaaaattttgttggacgtggtggtgcatgcctgtaattccaggtacttgggaggccgaggtgggagaatcccttgagcccaggagtttaaggctgtagtgagctatgattgcaccactgcattatagcctgagtgacaaagacagacccttcctcaaaaatatagaaaaataaatattgtctaaagttagtagtatctactttacagaatgtttagctggcaccaacttgtgtttttggcattgcttttgattcactgttattctgagcaactatctataattctctacctgaggacagatgagatgaaaagtgtttgtgctgcaaccgtcaaccaggtgggcagaatatcatgtaccccgtggaaacttattaaatattcagtggtgctaagaatatggaatggctcaaagggaaaatgagttctaacttacaggcgactccagtttgaggcagcatctctatgctaatgtaaattctttaatgcagaacctatacagttagatggtcagggataaggcctaagggatgtttagcagtaaagtcgtgtgtgtgtgtgtgtgcgcgcgcgcacgtgcgcacacacactcaagtagcacatttagagatctttatccagataaaccgagaagaataaaatgattctggaacaagcttagtttgtccgatttattcaaagtttacattgcaaaggagagagctagttttcatctagtccataaaatcaggtggcatacgtatgctatttatgtatttgtgttttttattgtgggaatcttcaaacattcaaaattaggacaaataaatgaatacaataaataaaatgaattcatttatcatcactagattcactagtcatcaatacatgccaatcttgttttacttattttctttccccatcccctagctatataaaatttaagcaggcagcacatgaataggtctctatttgaatttagtatatcataatattatagtaaactgtatagtgttcttaatttttaacctgtttttactacaacaaatcaaaacgtgacttggggagattttcataaatatttttgaggagacttttagagaaaatttaaagctacttggtagatttttgagaaacagtttcaggaatacctcatattttgttgtctctttatttatagattttcctagagcagggtgtcagcattagatagcaaattattggaccaactgctctctgaatagaagatctttgctgttttgtcagaactcagtagcagaacttttctgatattgtttgacttagcctaaagaggtgcctggagtgtaaaatttaagaagacactcattctcaggtgcgaactctgtacctcacaagcctgagaacagagtgcctccttagttttgtgcctggagtgcctcacttgccttactcttgtcctggccttgttacacatactcatattaaaatcattttttgagctcttcattcttgttttagtgaagaactgaaaagcttgggcttaagaggtagccaacacacatagatacatacctactttttattttgaatttatacttttcatctcaactgtattccctacttattaccttagagtattacaactgtcattagaacacttaaatttaagtgccttctatgccatgcacagtggtagatgcttttacttacaatgtttcacttagttctcacatttctccttaaagcagaggttattccatgttacaggtcaagaaatgtttactcagactgaagaactcttcctaaaatcatgcagctagtagtaatgtagctaggatcccaacctagttctgagtcccagactccattgctggttactaccttcatggatgaatgtataccagagaatttaggccaggtgtggtggctcacgcctgtcatcccagcagtttgggaggctgaggagggtggatcacctgaggtcatttaaatgtgtatgtgcgcacacacacacacacacacacacacacagaactgcttcattttctcaaagtgtttacgtttgaatacataaagactgagttatctgaacactgcttcattatagaaatctcaaaaaagaaaaaaaaaatgaaagatacaaaaaaaaaagaaatatcaatcctcttattccagtgatggatatgagtccttattttactgctcttgaggagtgattttgttccactttttcagaggctactccacatggtggcagcactgcaccagcacatattagattctcttagaaaagaaaagaatgaatgcttccaggggttgtgccttagtagttttcttgtagctcacttcagaagggcatcctagatttgaaagcactagaatatctgcagaaatgactttgaaatcttctaatatgagagataaatgttggtcgagggctgaaaattcttggtgttatattgacctcaagtctggttcctagtgacactgtgccttgctgcaggtaacaaagctttaccatagttttgtttcctgtgttttgcagagaatcacatacatcttactttcctgcagttgttttacaatttatagtttagttgaagctaacttttgatgaaatactagttaagagagaaaagatgaatttagaagtaaaaaaatctcactctattaagtcctagctttatgttcatgttgtttaacttacccaagtctgtttcctttcctggaagatgaaggctactatcttagagagttgtttggattattaattgagcttttgcatgaaaagtgccctgtaaagtgcttggcttatgggagctcataagtggtggctgctactgtaattatgaagtaggtattaggcagaggttaacattattgctacaatattaatttaaaaggttctgattcctttaatatttgtatggactatctgttccaagggaattaaacttgtcgtcagatgtggactttattagttcattattttgaaggtaaacctccatccagaataaggaaacattttagagctatagggaaatagcttttgtggttttttttacaaatgtcacaagtatatatttgcaagaaaatgtgtatctttttggtatatgacttgttttattgagatatgcacttttgaatgaatgatagtattctctagcttcgttactatggttttcttttttgctctcagaggcatttaggggtattcaaacctcagttaacttacgtatattagaatttgcaactccagagatgctcttgacagccccaccatatgtgctttgctttttgtttttatttattttaaaaatttactttttattttttgagagacctggtcttgctctgtcacccaggctggtgtgcaatggcttgatcatagctcagtgcagcctcaaactcctgggctcaaacagtcttcccgagcaactggaactacaggcatatgctaccatgcccagctaatttattttattttattttttgtagagatggatcttgttttgttgcccaggttggtctcaatctcctagcttaaagcaggcctccagcctcagcctctcaaagtactgagattataggcgtgagccaccatgcctggcctgctttttgtcttcttgggttcagtcctcgtaagtccctttggtttactgcgtagcccctttgatcttcatcttccagactgtctatcactctcacagctgcccatgagaatacctgtgcttcattgttctgtcctctctgcaaaattgcaaactgttgaattagtaaaaaaaaaaaaaaaaaaaaaaaaatttctcatttgttaagtgttcttctgcataagcagcatgctctcagaatagcctcaattcaggccaaatataatctttaccaaaagttgtagttaaacttccagcttcttttaatttgaacttttgcttgaaaaccattttatgaaaaataacatttttcttctcagaaagcagtatgtattttgactatgtgctagccagcacgtagacacagcatgggattatgatggtggttctcaaccaggagtgattctactctccagaggacatttggcaatgtctagtaacatttttttggttgtcaaacctgatgggaggagtgctactggcatatatcgggtagagtccagggatgttttcaacatccttcagtgtacaggacagtcccccgacaacaaagaattatccagcagtaaatgttaataatgccaaggttgtgaaaccctggattatggaaatagcactgaggcttcagagccagagtggctgctgtttgagtcctggcttggctgcttactagaaatgtggctttgaacaagttatttaaaatgaacttcagttgtcttatatgtaaaactgaggtaataatgccgattttagtgaattattttgaagatgaaagaataatgtatttaaaattttaaactttgcctgatatatggtaaatgcttaataaactgcagctattcttgaggaagtggcctaacattatgcaccttccggttgttataatcttcatttaggcattaggaagtttacttgtgtggtgatttgttgtcaacctaagatgataaaatattgaaaaaatgccatctgtctagatctctttctaagaatttttgtcagaatatatttggtattcatgtaggctatgttaaactgcctattaaaggtaggcccagaatgcatagaaaaacttaatgacttaactttatttagtacgttaattataggattgttgttatccttaaatatatattagtaagtaacaattacaaaattaaaatattatacataaatgaaatttaaaatgtgtaatacttttcatatcaaatgtccatgaaggagttagagctggcagaattttaggcacatatgataatgtcagtatgtggtgagcacttgataagagtaacattgaaggtaatacattcagtctgtatctgagttcctcaaattgtgtttcatattataaaaggagctgctgttaatttttgcaggattgaagtttgggtaagtggaatcattgggggctgctttgatatgaggccaacttcccagctcttgaatttcccaccagttggtctgagtgtatttctgtctctacttatagagaaagcaaacactttttgttttccttttataatgtgctttgtggaaatcattttctgtgtattttcacttttaaaaaatcattacgtcgttttatattattatgaacttaggttttaaaaaatatctctttttttttttttttttttttttttttttttttttttttggagacggagtctcgctcagtcgcccaggctggagtgcagtggcgcgatctcggctcactgcaagctccgcctcccgggttcatgccattctcatgcctcacacttctgagtagctgggactacaggcgcccaccactacgcctggctaattttttttgtatttttagtagagacggggggtttcaccgtgttagtcaggatggtctcaatctcctgacctcgtgatccgcccgcctcggcctcccaaagtgctgggattacaggcatgagccaccgcgccctgccaaaatacctcattttttagaggaacaattttaaatttacagaaaagttacaaagacagtacagaaagttttcatatacgcttcagtcagtttcacctaatgttaacatcttacgtaaccgtggtacatttgccaaaactaggaaattagcattgggatgttactattaaccaaagtagaatttcaccagtttcaacactaatgtcctttcgctattccaggattcagtccggaataccaaattgtgtttagtcacttccttttataatgcatcagtctactctgtttgaaggtagctcgaaaacagaaaagtgctttacaaccatgaaatggcatttttcatccagtcaccatagcatagtggttgaaactcaggctctagaaccaaatagatttgggtttgtatcctggttctgctatttcttagacgagtggtgtctctaaattttagcatcctcatctacaaagtggagattacaaatagtgcttctatcgtaggattgttgtgaatattaaaggacagagggcttgcaaagcacttaatactggtcctcatatggagtaagcccctaataataacaaacacatatccttttttttttcttaagagacaaagtcttgctctgtcgcgtaggctggagtgcagtggcacaatctcggcttactgcaacctccatctcctgggctcaaataattctcccacttcagccttctgagtagctgagagtacaggcacatgccatcatgcctggctaagttttgtatttttagtagagacagggtttcaccatgttggccatgctggtcttgaattcctgacctcaagtgatccgcctgcctcagcctcccaaagtgctgggattacaggcgtgagtgagccaccatgcccagcagaaacatatattctatattgtacagtgattgtagtgccggatattaataattttagaagggttagtatttcagtggcaaaatttactttttaattttataagattaaaattttaaggttaagattaaaacttttaggatgaagaattttaaagattaaattttttaaagctctgagggcaacttacccacaaatgaagctaaatctaagagtactacttactacttttacaaggtaattattcaagggtgtacgtttaaagtagttctcaacagcaacttcctgaaagctggatctgttgtgtgttgttttggtggtttgccagtatatcaaggctcatttgtcactttaagatgacctcaaggctgtaatttggctggggaatactttactcttagaaatggggagatcataagtggtgtgataataagtgttttattttgttcaagttgcagcttgctttaatgaattttaggggccatggtccaaataactgtgatggttataggcatgccttttatttgtttatcgatatttatttgtagtgttttggctttgagagtacttgaattttgttaaatcatatcttaaaccacttaagtaatgaattttattttttgtaaaccttgttactatgtaatcagactttcttttcataatgagatgtgttggctcactaggtagttttacctctcattctaaggaagaagatggggaaaaaatggaatattctagattgtaatgtagcaggcatattaacagttggcattctagacagtgttttggattaaagtataagccctaagttttacttgtttgactggtactgcagtcattgtctccttaaggagataataatgactgaaactctcagaacaaatatgttgtcctatgcctcacatgtcatttgaggtcattctgtaaaggagatagcaatattctaacactgctaatttagaagagaacaaaaatatgtaaaccacctgtgtatttcctcataatagttttggtcagttactctacttctttcactttattcaagtcttcagggataccagccaaaataattgtaaattgagcagaaaaactgaagcataaatctgttcatagtgtgtgaccttgaaggtcattgctggaaatcaaagtcctgtaaatagtaatttacttaacaggaagaagtcactgaactggaaagtggtaagtttctaaggttccaaggccacgaaaatgagtgaaattagagtgcaaggtgaaaatcattttaagggacagggaaatgggtgagagattcctcataagtgagcttatgtgtgtgatattccactcccagtttatatctagatttcctttgagagtccttttttttacagggtcatttttattctaaccatacctactgtaccagctcactccttttttaacaaaatgaggtcaaatttattatcctcaactgctgcatataagacaggtatagatcataaatcatattttatagctaggtagtaaatctttccctccctaagtactgtaggatatgattatctctgaaatgtataaagtagaatacatttttctccttgtatataaatctacatgtcacctttgctggaaataatgtttggattatattatcctcccctactctgaatcttctttcccttcccttggttgaagttcacaagtcttggaagctctataaatgctggagaccaagtattagtactcagacactggaatcagatgcagaccttgagttcagattcaagcaggaatccctttctggctgtgttgaccctaagcaagtcactgaacttctctaagtcagttttgttatctgtaataggtggcttttagtagcagctacttcagagttgttatgaggattaatagcacaaagtaaatattcaatacattttagctattccagtcttttatctctgtaaaactcattctattagtataatgtaagtaaaaatacaaattgcttatcattaaaaattcaggctgggtatggtggttcacacctgtaatattagcactttgggaggccaaggcaggaagattgcctgaggccaggagtttgagagaagcctgggcaacatagtgagaccctgtttctatttaaaaaaaaaacaaaaacaaccagcagattccacaggtccataaggaaatatcatattgaagagaagtctgtaattaaggcggagaaagatttgtctaggattgagtatgattttacacatctacatgtgctgcttttatatatatgtttgtgtttaatatctatctctgtaaagtatacataattgggttagctctttgaggggatgtgaggggtggggaatgtttagtttcagtctccccaagaatagaatttaccataattgggaggcaagatgaataaaggattttttttagttttttattttacttttatctttttggagacagagtctcattctgttgtccaggctagagtgcaatggtgtgatcttggcttaccgcaacctctgcctcgcatgttcaagtgattctcgtgcctcagcctcccgagtagctgggattacaggtatgcaccaccatgcctggctaatttttggtattttaattagagacagggtttcaccatgttggccaggctgatcccaagcttctggcctcaagtgatccacctgtttcagcctcccaaagtgctgggattacaggcgtgaaccaccgtgctcggccaaggatttatttttttaatgctgcaaatgtgtccctttgtcacctggatgccaactttttataaatcaacttgtgctgaggaagctctcttaagaaaccctatttgtaggccaggtaccttatggtggctcacacctgtaatctcagcaccttaggaggccaagatgggaggactgcatgaggccaggaatttgagaccagcctggacaacatagtgagacccctgtctctaccaaaaaaaaaaattagccaggcatggtggcatgcactgtggtcccatctgctagttcaagattacagtgaactatatgattatgccactacactgtagcctgggtgacgggcaagaccctgtctcttaaaaccaaccaaccaaacaaaccccaaggaaatcctatttaaaaattcatttttaaagcgaaactttctctagaaacccccctttttggctgggtatggtgactcacatctgtaatcccagcactttgggaggccaaactgggaggattatttgagaccaggagttcaagaccagcctgggcaatatagccagccccatctctaaaaatttaattaagaaacttgactgggtgtggtggtacaagcctgtagtcctggctactcaggaggctgaggtggaaggatcacttgagtccaggagtttgagattacagtgagctgtgatcagtgcgactgcattccagcctgggcaacagagtgagaccctgcctctttaaaaaaatacaatttttttcttggaaactctaatttttctgaaatggtagctaaaggccattgttctctttctgtcagtatttcctaagagaaatgccaattttttgacaggagaagtgttacacatagttgtgttaacagttctaaatcaaagtaatagttcaaatgaaagaagcacacctttgtcttagtatacaggtgagtcaaggcagttattgtaagggttggatttgttcttttgtgatattattgtctagagaagactctggaggaagaggaagtaaatcttgagtttcaatctattattttaaaagtttattttaaaaacggaacaatatatattcatagtacagaattccaaagaaacagtataaacattgacaagtgagttgtcatgtactctctagccacccagttgctgtctcaaagttagtctttttctttaagatactttagattcagtgcgactgatttattttaagttttcattgaagagtgagagaaactcggcttacggaccaggaaaactgagagtgctgcctggtgagcctgcctcagtatgttgctaaaaatgtaacagtctgactgtggagattaggagatgaaagtgtagagataggatggaaggaacttcaagaaattttagagaaacattagagttttggtatagaggggtaggatagcatctcctctggacggtcaccatttggcagtgatctctcttatttgtgcaggctttgctaaacaatcatctaatctgatctttctggatccttaagttagacttacttttctccatttcatttcttgttttaatgtcatgataagtggcaattgcctatttaaacatcagaccatacacttcattaggtgcattatacacttggtttaatttccagttgcctataataacagaggatttctaattgctcattctgtttagcattcttctggtctttttctccccattgctgtttttaattctcccccttctctcgttttctttgtctatatttcctattactagaccttatatttaatctttttgtttttttaaacatgaaaagggtttcactgacagaagtggtaatttatttcagacaactggtaaccaagactgggcatgtgttggcaacaataaatcaaaacaggcatttggccttctgatatgatattttgattctttagactataataaggtcaactaagtatgttgtgcaagggaaataaaatatcttgcatgtgaagcacatggaagggattattatttctctctttatggcttttctcatgcttgatgatagagttagcaaacaaaaattaagtcagaaaagagcctcatacatgttaccatccagtaggtgggctagataagttttcctgatttgtcttaacaagtataaaatagtatatctgtaaccatatttaccaagtgagtctctgatttttcatcttagcatctttgttctgatcaccaaagtatagcttgagatgattgcatttgtggcatcattatcctttacataataatggacatttttgtaagtatattatttgttaaataaatcacattctctagacatttatcttctagataaaatcatatgctgggataatctgaagattacacagatgatgtgaatactaaaatcaatagctagattgtagtcattatgtttcttcccttgctaacaaaatgataatcatacaaatcttaatttctctagtttttattaagggacttcagtaagaactaacaatggttttacatttttgagaatatttccaatatatataattgctgaagcttgtctcctatcacatctcatttatacttggagaatatttatttatttatttttgagacggagtctcactctgtcgcccaagctggagtgcagtggcgtgatcttggctcactgcaaccttcacctcccgggttcaagcagttctcctgcctcagcctcctgagtagctgggattacaggcacacaccaccatgcccggctaattttttatatttttagtagagacagggtttcaccatgttggccaggctggtctcgaactcctgacctaagtgatccgcccatctcagcctcccaaagtgttgggtttacaggcgtgagccaccacgcccagccaacttatacttggagagtatttatattcagcctcactttgctaatctttcatcagcatctgggaacctcactgcaaaacatggtcttaatttacttgtacaaagccacaatatatagtatttgtatgtatgcatttttttttttttttagtatttttgcaacttttaaatgactttagatgttcttcctttgtagatttcttaaaattaatttgtaattttgataaagtgttgacttttcttcctgcagctaaatggattcccagatctgtgagtcaggatacaagtgtactttctagtataaggtagcaatttttcagccgggcatggtggctcacacctgtaatcccaacactttgggaggctgaggcaggcagatcacctgaggtcaggggttcgagaccagcctggccaacatggcaaaaccccatttctactaaaaatacaaaaattagctgggcatggtggcatgcacctgtagtcccagctacttgggagactgaggtgggaaaatcccttgaacccagtagatgaaggttacagtgagccaagatgtgtgcctactcagaaagaaggatacatttgaaatactgtatttcattgaatctttaatgccactgattataagatgtattattattttctgtattactaagaaagaaaaatgcttcctattgaactgacaggccattgattataaaatgcaacccagtttcaaaggtgttaatgtgaaaaactgtagcttacagttgatgaattatggtaatataaccagccaccttaaatttacataaggctttgtagaaagcacttacacatatgtcatctgatcttatccttaaactaaaactaatctgtgaggtggattaaattatctcgttttcagatgaagaaactgaacttcacagagattacatattctctcagcattgtatactagtgaactagggtctcaggcccacatattctcactctaagacttgtagtatgattaatggtgtcacctcccccaaacccatacatatacagctacacaactataagattatttggcctagatttttctctctgttgcctaatgtacatatttcatattcagactttgtcatttttcatatgctgttcatatgtcttgattttgaaagttttgagtgctgttaacatggttaatgtatgttttcctattaaataacatgtgactctgctaatatatgaattgttttaattctgggttgccttaccactatatataatatcattggtggtttaatatatgttttgaagtgatttatttgtttctatctgactaggtaaaatgttcaggaatggttatgaattgagatccgtgaaatgacccagagaaggctgatgaagtgtttgtctatagctgtgctgttcttggtgaatcaaggtcatacccccttcttttccaggtggtggctaatgccgtagcggcattatctgaaatcagtgagtctcacccaaacagcaacttacttgatctgaacccacagaacattaataagctgctgacagccctgaatgaatgcactgaatggggccagattttcatcctggactgcctgtctaattacaaccctaaagatgatcgggaggctcagaggtcagtctgttttcctggctactttctggtagtcttgcctgatgcagtaagttctggagtctgctattagaataaatctgttgaggaaggtcagtggcttctggggtagatattgctatctccagggtattttctctctggatttaggaatattttaggtggtagaataaactatgcaaaactatttctaagaaatgtatgtttttcatacagttacttctgctaaaatctcttttatcgtcttacgtctcccatgcacagttcttggccatttggccagcaaagattattgagtatctctctttggggtgacagatttttcattctattagatatatagaaagtggcttcatattagttattgagctgacctgtatatataattcagtatgagagagagtatgttaaagtcagcagaatatatcctcctttccagtagatatggaaaccatgtcagtctgaatttgaagattttagaaggcacacctagattgttctgctcagcctgttaccatgtaatgttgcaaattttctttggttattagaaattgactactaaatttcatctacacatacatacattttagtttacaaagttggaattatccctaatttttattgagcattttgtatatgcaggcactgtactaggcaaagtacttctgaagaaatgttggctcttcattaaagttggtatattttaattatggtatttaagaactggtctggctgaagctgatttccaagctactagaatgtaagtgatcttcacttatctgggaaattgtccctctggactgaactaaagctcactctgatagtttctttccatcactgaaagtacaaatatagtctggaaataactttactgagaattttattttcttctgttggccattgacatcacattcattcattcactcacttagcaaatatttattaagtgcatactgtgtgccaggcagtgttccaggctctgaggatacagcagtgaacaaagtcatggccctctgggatcacttattctgaaggatgggggtaggaatatatataatatgtatagataatataatatataatatgtatagatagtgtaatatgtaatatgtgagatggtgataagtactaacaagaaagtaaagtagagaagaaatctaagaaatgctgggcatttgggggtgaggggttgtattttctttttaaaggatggccagggaagacctcactgagaaggtggcattcatataaagacccaaaggaagtcaggaataggaggaagagagaagtacagcctatttatcttctttctttaatacagtaagttagctacttgtgttgcccaagctaccaaaattggattaatttctaaagaaccctcaacagataattaaatatcaaccattttatgaggcatgtaagtgtaggtggcaggggctaggagaggggggagacaggaaaatatagtagtggtgtcctgctatttaaaaaacaaacccttttcagagagtcccttattctcattatccttaagagaggaggttggattgttttccctaccagcctgcctcctgctgtatcttacaatgaaatcttcagccacaactgcgtttgctgtctcttcctatgaaataactctcagaatgcttaatttgacttcctataggttgagtagaaatgggctgagaggcagggagccttaacataatatggggagacaaagaggactataaaacaagaaggtaaatggtgtgagctcaagtgtcttgggtattgctaggttctttccagtttgaacatcccttattactggtttcctgaagtcttcttatgtccctgctctgcctgtagtttgctgagaatgaggcttctgcattgttggatcccaattttacctaagcatggagctttgacttttctaactaattctttaattttttgatacttggccattagactctgacatattaccttatagaatgaattcagcaaataaattataattcatgatattaattttcattctccaccctcagcatctgtgagcgggtaactccccggctatcccatgccaactcagcagtggtgctttcagcggtaaaagtcctaatgaagtttctagaattgttacctaaggattctgactactacaatatgctgctgaagaagttagcccctccacttgtcactttgctgtctggggagccagaagtgcagtatgtcgccctgaggaacatcaacttaattgtccagaaaaggttgggaaatagcgaagtgttgattaaagtgtttgtaattttgcattaagcttaataatgtcaatgttaattaggctagtgttaatctctttttaatatatggaaatgaaaatgttatatggcagaaaaacttgcttgcctagcaccaggaggctaacagttgatattacagtgtttctataataaatgccatgcgttgctccacaatccagtttgttttctgaagggtctctttctgatatactgtctagtgcctggttgatatggttcaggctgtagtttagagccagattgttgttctagcagttcttcatggcaacatgtgccctgatgcttaaaaaggataaaaataatctgccaagtggaactgataagaatagaggcgtatagaggaagtttatgcttttttttttttttttttttttttgcctgagtggagcgagaggagagcagagaggcacagattaggtattaatacagtctcagaagggtatatcagtatatgccttcaccttcctttcttctgtttctgtgtaccctaggcctgaaatcttgaagcaggaaatcaaagtcttctttgtgaagtacaatgatcccatctatgttaaactagagaagttggacatcatgattcgtttggcatctcaagccaacattgctcaggtcagactttatgcagactcaagttgatgatgatttagctcttaaggtctggcctttaaagaagctaggctgtgagattgctatttgagaatccttaatgattaaccacttcctgggtttaacaggttctggcagaactgaaagaatatgctacagaggtggatgttgactttgttcgaaaagctgtgcgggccattggacggtgtgccatcaaggtggaggcaagtgtctgatggtagttaggatcatgtattggggattctgagagttctcttcacttttttctttaaaataatttttaagtttatcaaaataataaagcacacagtttcaatgttaaagaatttttaatggaaagcagctgtctctggttcctcccttccctacctagactttcttctcagagggaatatttttaactctgattttgcttttagttattcttttgattaaaataggtcctccatatccatgagttccacatccgtggattcagctaactgcggatcaaaaatattcaggggaaaagaaaaaggatggttttgtctgtactgaacatgtacagacctttttttgtctatattccttaaaaatataacaattatttacatagtatttacattgcattaggtattataaataatctagagatggtttaaagtatacaagagaatgtgtataaatgcaaatactataccattttatgtaaggcacttaagcatccatggattttggtatccacaggggcccaggaaccaatctcccatggatttggagacatgactgggctgccatatctctaaataatattcttggctgggtgcagtggctcacacctgtaatcccagcactttgggaggccaaggtgagaggactgcttgagcccagcagtttgagaccaccctaggcaacatagtaaggctctgtttctacaaaaacttttttaagttagctgggtgtggtggcacacacctgtagtcccagctacttggaaggctgaggcaggaagattgcttgagtctgggaggctgagactgtagtaagctgttattgtgccactgcactccaacctgaaaccttttcactctgggtgacagagcaagacgctgtctcaaaaaaagaacaacaataatattcttatgctattatttattaatttacctatcatagactttttctgttaactatctgctataagaagtttacttcatacacccaccattcccacttccgtctcctgttttccagtgtagttacataatgaaggtttttgttcctatatccattatcatggtagattgaaataatatgcctttgtttcttattctatcaactgttggcttgcaaaatttatgcatattacgactgtgtaaatatttagggccaatgtaatgcaaatgattacattttctttcttatagcatcttttttttttctggaggttttttgttttgttttgatttttgagacagagtctctgttgcccaggctggagtgcagtggtatgatctcggctcactgcaacctctgcctcccgggctcaagcgactcttatgcctcagcctcctgagtagctgggattacaggcatacgctaccacacctagctaatttttgtatttttagtagagacgaggttcgccatgttggctgggctggtcttgaactcctagcctcaagtgatccgcctgcctcagcctcccaaagtgttgagattataggtgtgagttaccacacctggccctggagtttctttaattgcctctttttttcttgcatgtgtgtctttatcatgcccctatattattcctgttccttaagcataatatcaaatctgtaaactttcttttgtcttagacccttctcttttgcagtcctctgtcttcttgttttttctactctgactgattgcttttctggcttctgcacatcattccatacagcctccctatttcttgttattggtatatttttccttgcattgctctttttgtggttgcaatagcttcttgaatctctgaggatatgaatgattcgtttttttgtttctgcactttgaatttaattatcggatattttttggtgatgattgcatatctatgcatataattttttaattgagatgtataccatgcatacagtaaagtgcagctcgtttctgtttaagaaagaggtaacagaaaagttgattaggacttctgtatacataggcaaggctgtcgactatcaggtttctgctttagggaagggggtttatctttacatggaagacctcttgaagagcctatctggtcttagagggcagattggtttctagcttggctgcagccttccggtaagtattatgggctgtaatttacattgccctgcttcatcagtcagcagtcctccatttgtttgtcctcattcagaaatttgttgaaattaacagtggcttctgttcactgtttttatgggttcagagccccatgtttgttcttgctacttgattatatgcagttctgcctagagtcagaggattggaccatatgatttctcaggaatacgaaaacaatttgtacagtatgaccagtactttaccggaacaaaaggaggcagatgtgtgtcagagaatcttctatgaaatacctgttcctaattggccttccttgttttttttcagtttagtgctgcttcatgtagtttctgttgataaataatttaatagaaaggctgttaacagcaagaagttagctagtcctgggttctattcctggttctgctagctcacttgattcagatatttaatgtttctcttcattggagaaatgttaaagtctttttgttggatcttgatatgttaacattgtttttattaccactgtcaccacacgtcacaacttgtttttcttttctttttacgttaacatatcttactagccgtctacttagtattaatgtagataattttcagagagattttggtagcataagagtaaggtggttttgttctcttcactagtgtacatagccatcttttccacaagactgccattgtcttatgacctacctctctgacaaagctgtaaacagtaatacaaaaattatatcttattctgaagttcagagactttctagccctggaattactagaaagtgttctcaaagcatctagattcctcaaggctgttagtcatctattgtgactaatggaaaggttctccataatcttctggaaaagacttctgatggctttcacttcttcctttgactaagcgtgctttgatgggagtatgacaggatgtgaggaatgaactttcccaggaaacttaaggtcacccttcaggaatcctgtcttatctagtgctgtcatttcagattacccagatttaccttagaacttttcctgtaactgtttcagccatgaaggttttcagtttgacagagttgccaagccaaacagttaattggaccaggagaggcaatgattgcctgtttgcactaactcatccatgggacaggaatcagcagcataagaattgtaatgaactttctgtatagctttgggaagcaacaagctgttgagcaaataaatagcactgaaaaagcaatcctatggtgctatttttttgttcaataacttttgcctatttctttcaggagtaaacaaactcctggtccttttcagttttaaaaaggagagaggttgaggcactaggttaagaccaggagttcttcacttcctggtcttctggttattttctgtttactatttctgatttttatatattagaataaaatattggtttgtgtgtcatttcttaaagacaaaaaacatatttttcctattaggaaaaccatatttgtttactatatataattatagaacaagttaaacaaaaaatggggtaccccgctttccccatcttctgtttcactctctcagatatgcagtggacataatctggtagacatcattttatatcattgtttatatagtgttctatacaaagatgtatttttttataaaaatgaaatcattccacaaatgctatttatttactttgttttatcctctacttttttttttcttactagtaatatcatggacattgatccacattataaagaaaaatttatgtcatctttagtttctggtttatagacataacgtgattacttgataacttactgaatttgtaactttatcccttattataggaccttaaagttgtttctactctttttccaaatggtggtataaggagtatccttgcaactaaatctttgaactctagttgaagtgaacattttttcataacagttatgcttattagccatttgggaattgctcactcatgtcctctgcacctttttccaatatgttatcttttccacattgttgttttaaagtcttttgtaattgagatgttaacccttcttttagttagcatttattttcctagtttgttgtcctttagatttcttctgctttcttgatgcacagaagtttagatttttgtatcagcttttctcagtcagtgtttttcctcagtggcacacttagaaaattgtgcttcacctaaagttatataaaattcactattttttttttttttacttctatggcaatgattttgttttatttgttttttggggggtggtggggaaatggagtcttgacttgtcgcccaggctggagtgcaaatggcgcaatctcagctcactgcaacctctgcctcctgggttcaagtgattctcctgcctcagcctccagagtagctgggattacagacatgcaccaccatgcccggctaatttttgtatttttagtagaaacagggtttcaccatgttggctatgctggtcttgaactcctgacctcagatgatccacccgccttggcctcccaaaatgctaggattacaggtgtaagccactgcacccagcccttgttttatagtttaagggtaattttaatcaaccgggaaataattttagtgaaagatatgagtagagtggatcaaataccagaacaaattgttctttccttactgttatgaaatgttgtctttatcatatactgaattttgtatgtatttctgtttctggactttttgtatatacaatgatgggatgtttacttctgttcctctgccatactgctttaatggtagttttttttttttaatcaaaagcagtatggttgagatgataattttctttgaaaattaatatccctgacataaatgtttttcaaatgtttatacatcatgagtaacatccttttatttgtattcattttaatgataatactacggatttactaaatatgagctttatatcaagcactgtgctaagcacttacttgtattattaatttatggtaattcaatgcttacagtggcccatattctacatactacataatttattaatataacaattataatattaataaatatagcatatttaaatttttccaactgttttgctgttgcaataacagcaaaggaattaatagctgaaaatgaataaaatagaggacataaatagaatcagaagaaggacagaactacataaaagactgcagaatcggccgggcgcggtggctcatgcctctaatcccagcgctttgggaggccgagttgggcggatcatgaggtcaggagatcgagacatcctggtcaacatggtgaaaccctgtctgtactaaaaatacaaaaattagctgggcttggtggcccatacttgtaatcccagctactcaggaggctgaggcaggagaatcacttgaaccagggagtgggaggttgcaatgagcatagattgcgccactgcactcagcctggtcacagagcgagactgtgtctcaaaaaaaaaaaaaacagactgcagaatcatttcatggtacaacagaaccatcctatatatgacctcatataaatgatctcaaggtacagttttgtttttattaaattgcttatagtggtttagattgttatagtacttctaaagatcttattacagaaattttcaggtgtacaataaagtaaaactgaataatgagatcttgtgtagtcatcatccatcttgagcaaatactgatatgttaactgtttccgttttatcttctccctcttcctcttccttcgggtgggtgggatgcgaatacaaatcccatatatcatcttactcaagtagtccagtgtgtatatctaagagataagatactttaaaaaatatattgtcacattaccatgcccagcaactaacaataattcttaattttattgaatattcagtacatgttcaattgtccctaattatgtaaaaatgtctttttacagtttgtgcaaatgaaaatctaaatatggtctgggccaggcgctgtggctcacacctgtaatactagcactttgggaggccgaggcgggcggatcacttgaggccaggagttcgagaccagcctggccaacacggtgaaaccccgtctctactaaaaataaaaaaattagccgggcatggtggcgcacgcctgtaatcccagctactcgggaggctgaggcaggagaaatgcttgaacccaggagacaaaggttgcagtgagccaagatcatgccactgcattccagcctgggcaacagagtaagactctgtctcaggtctgcacattgcatttgaataatgtgtctcttaagtctttttacttacttattttggtgccaggtattgaagaaactaggtcattaggcttatagaatttcccacagtctggatttggctgttgtatcttagtgatgcagttttatctattcctccatcctctttaaataattaaatctagaggcttggtaattttcttgttcagaatttttagcaagaatacctattgggtgattctctgtacttcctgttgcatcttatcaggaggcacataatggagtgacccattatagtacattgtaatatatgataggctggtccttgacttttaggatctctgttctggtatctctctcttttaaaaatgatcacttatagtttctgtacatttgttttttcacctgtattctctcatattctcttcattaataaaagattaacagataaaactccattttatagattaattataggctatggaaaattgttgtttatctaatgccatagacttttaagtttcatagccccaatattggtaaattgtcgagtactacagttctttggagtgttttggatcatgtgtaactttgaaaatgtaatggaagttgtagacccactcactggaaaatatgcttgaaagctcctacaaaatttggcgatttcatttcagtaggtttaaagacaccctctgctatctccactcatccatgaacttcagttaaagacctcctactttggcttattctttaattcttattctttcctcctacgatggcttattcttcttacttctatctcctggccatccaagatgggtgtgtgtgtttctctgtttctggactttttgtatatacagtgattggatgtcactctacttctctgccatactgctgtaatggtaggtttttttggtggggttgggggcatagtctcgctctgtcggccaggctgtagtgcagtggcacgatctcggctcactgcaacctgtgtgtctcccgggctcaagcaattctcctgcctcagcctcccaagtagctgggattacaggcatgtgtgaccactcctggctaatttttgtatttttagtagagacggggtttcaccatgttggccaggctggtctagaactcctgacttcaggtaatccacccacctctcacctcccaaagtgctgggattacaggcacaagccactgcacctggccataatggtagttttttgttttgctttgttttgttttgttttgttttttgagacggagtctcgttctgtcaaccacattggagtgcagtggtgtgatctcggctaactacaacctctgcctcctggattcaagcaattctctgcgtcagcctccggagtagctgggattacaggtgcctgccaccacgcccggctaatttgtgtatttttagtagaaacagggtttcaccattttggctaggctggtcttgaactcctgacctcatgatccagctgcctcggcctcccaaagtgctagtgctgggattacagtcatgagccacagtgcctggccttttgtttgtttgtgttttttgttttgagacagaatttcgctgttgttgcccaggctggagtacaatggcgcgatctcggctcattgcagcctccacctcccagatgcaagcaattctcctgtcaaagcctcccaagtagctcggattacaggcatgcacctggctaatttttttgtatttagtggagacggggtttcaccatgttagtcaggctggtcgcaaacccctgacctcaggtgatccacctgcctcagcctcccaaaatgctgggattacaggcatgtgccatcacgcctagccttggtagtatttttttttttttaatcaaaagcagtacggttgagatgagaattttctttgaaaattaatatccctgacataaatgtttttcagatgtttatacatcatgaggaacatccttttgtttgtattcaaaggattcatttgaactgattcacctatcagttcaaataataaataaaactgtatcatatagcttggtatctagcctgtagtacagcttggtcaaattaagtgcctgatcatttagtttggtttagttgatgcacctgcatgtttcaaaatttttatgttgaggtggtgttatcgcatagatcatctgacttctcattttttgtatttttcttcccagcaatctgcagagcgctgtgtaagcacattgcttgatctaatccagaccaaagtgaattatgtggtccaagaagcaattgttgtcatcagggacatcttccgcaaataccccaacaagtatgtccaaatacctttacccctctttctcaaattacttaggaaatgtttaaggcactttgaaattgcctaggtaagaattactcttttgaatgttcctggtcataataggatactttatcaaaaatcggaaacattaaaatggttagcacagggattaaaacctgagttttcactctgctttctttctttaggaagaattgaagctctgcctgaatatgcattgtctattggcatattttaaagttaaccagattctttgatggcaaagttactgttaaataggacatctatatattctaggttgttcaggcataatctcagtttatacctgttatccagacataattaatgattgtgcaccttttcttctcagaaatgtataagtttggatgatatatcgtatagcaccctaccataaaagccaggaagggaacagctgtgctatttactttgcatgttacctactacattgtggagaattacagaacatgtaacattatcagtctcatgccttttctgaagtattgtagttattctcatacagatatataaaaaaaaatctgcatttttacttcacaagtttttcagattgagggcctcttagtatatgaagcaaaaatactttttagatttgatttttgaaaacaagtaattaaggaatctgaaaatgaaataaaagcaggttttataagcatcttaaatctcattttgccttacactcatagagcttctgattgtcttttttgagatggagtctcactctgttgcccaggtgagtgcagtggtgcgatcgcagctcactgcaacctccgcctcccgggttcaagtgattctcctgcctcagcttcccaagtagctatgattacaggtgcatgccaccatgtctggctaatttttgtatttttagtagagacggggtttcactagccaggccagtctcgaactcctgacctcaggtgatccatccacctcagcctcccaaagtgctgggattacaggcatgagccacgatgcccggcccacttctgatcgtctttaaagatagtgttaaatgaagcagcttgtagtaagttagcttagtggtgggctcaagaattagtagatatattttggcaaggtagtggtttattaagcattgtgtatatttttaaaattttagaaatagttattttggaaagagaaccacatacttttactactctcccaataaagaagagggtcggtttctaaatttttttttttttttgagacagtctcactctgttgcccaggctggagtgcagtagcgtgatctcagctcactgcaacctctgcctcccgggttcaaacattctcctgcctcaatctcccgagtagctgggattacaggtggctgccaccacacccggctaatttttgtatttttagtagagacagggtttcactgtattggccaggctggtctcgaacttctgacctcaagtgatcccccccacctcgccctcccaaagtgctaggattatgggcatgagccactgtgcccagcctaaactttttttaattaacttttttgtttgtttgttttcagacaggatctcactgtgttgcccaggctggacacatactcctgggcttaagtgatcctcttgcctcagcctctccagtagctaggactacaggcctgtgccactgtgcccgacatttaaacttattaagggtgaagatgtgtatctgaatgtgattggtagagaaatgtatccatttctggtttatggttaataaagagttaggacggtttatgtttaagaaagcaatcaagagcctggtttaatcagtaaaagtaggcagatacttagttaagtgtgctatttagttgtccacatctaatttattatacagggtcattctaatcgttaaaactacattagccaaggagatggattcaacatggtaagcctgagagagctgtagatatgtaaaaataaatattttaattacttctttctttggagaaataagtcagtgcaggtacctttagaagaactaacataaagaaagatctctttggggccaggcgcggtggctcacgcctgtaatcccagcactttgggaggccgaggtgggcggatcatgaggtcaggagatggagaccatcctggctaacatggagaaaccctgtctctactaaaaatataaaaaaattagccaggcgtggtggcgggcacctgtagtcccagctactcgggaggctgaggcaggagaatggcatgaacccgggaggcggagcttgcagtgagccgggatcgtgccactgcactccagcctgggcgacagagcaacactccgtcttgaaaaaaaaaaaaaaaaaagaaagctctcttttataaaaagcagagataagtggattaagggacagatttaccatttcttgtctggacactgttgttgtctaacttcatttgcctaaaaataaagtggaatttctgttcctctctaccatgaaggcaaaatggaacaataggaaaattttctaatgtacttatatgaaagattgttacaaatacaaggtagtggtattatcttacaccacaggttaatttttccttgtaaaaatggcagtgtggctcgcacctgtaatttcatcactttgggagaccaaggtgagaggatcacttgaggccacaagtttgagaccagccggtcaacatagcaagacccccatctctacaaaaaaatttttaaaatttagctgagtgtggtggcactaaattgtagtcctagctacttaggagactgaggagggaggatcgcttgagcccaggactttgaggttacagtgagctatgatcatgccaatgcactctagcctgggtgacaagagtgagaccctgtctccctgtctcaaaaaacaaaacaaaagaacatctgatgaatttttataaaggttttaaggtctaggtcttaaaaaataattgaagggaaatttaagtcattaaaatcttctgacttaaaacctattcattctcttgactaaaagcttttacagtttggtggtttggtttagggtcccttgtttgtggttttgcctttagccttcactgttaaattagttcttagttttgccctcaataaccatagttcattttttttcatcaggtatgaaagtatcatcgccactctgtgtgagaacttagactcgctggatgagccagatgctcgagcagctatgatttggattgtgggagaatatgctgaaagaattgacaatgcagatgagttactagaaagcttcctggagggttttcacgatgaaagcacccaggtaagttcttgtctcttgtctatcctagtagttttagatgtctttggggagatttcagagaaagcaaaggttataggcagtttcttctgtgtctgtatttacatatagtatgttcatttttctcccaacagggatgtctcttctcagttttactaattttttgtttttgttttcgagacagagtctcgctttgttgtccaggctggagtgcagtggcaggatcttggctcactgcaacctttgcctcctgggttcaagcgattctcctgcttcagcctcccaagtagctgggattataggtgtgcaccaccacacctggctaatttttatatttttagtggagacagggtttcaccatgttggccaggctggtcttgaactcctgaacttaggtgatccacccgcctcggcctcccagagtgctgggattacgggcatgagccactatgcctggccagttttactgattttttttttttttttttttttttttttgagacagtttcactcttgttgccaaggctggagtgtagtggcaggattgtggctcactgcaacctctgcctcctaggttcaggcgattctcccacctcagcctctcgagtagctgggattacaggcattcaccatcactcccaactaattttttgtatttttagtagagacagggtttcaccatgttggccaggctggtctcgaactcctgaccttaggcgatccacttacctcggcttcccaaagtgctgggatcacaggtgtgagccaccttgcctggccagttttactgatttctaatgttaaaaacctacataactcagaccagtagttctcaaacttcagtgagcattattaacacctggggggcatttttaaagcacatgttgctgggcttcaccctgagagtatctgactcagtaggtctgagatgtgcctaagtatttgcatgtcttacaaggttcagggtgatgctgctgctggcaatccggaaccacacattgacaaccactggcttagagcagtagttaccactacttttttattttctgtcacctaagaatgactacacatttctgttagtaatggctgtggctcattacagcagggattttcgctagaggctgtggtgaggtttgaaaagattatctttggatgaaaattctgagactgcttctcactttcccctaccaaaattagagccacagaaccaggaagccaataaattattaagcccttttttcttggcatttgtactcaaagcaaatagaaaataatgtatgtaatctactatagcaattttaatagacctaattcaaggagtatgtacaagtcaatagctttgtggtttagcagccaactcctaataggctgtaatctgacataattctactgtcttggctcttgccccagtacgacagatgattccataattccccccaaattgtagcttttggtagaagtaaataatgaaagacttgctcaggagccaattttatcaccatcagtatgttaacatatactttaagaaatacaagccaggctcggttactcatgcctgtaatcccagcactttggaaggctgatgcgggagaatcgcttcaagccagggctatgagaccagccctggcaacattgcaagactacatctctacaaacaatacaaaaattttaaaaattagttgtagtggcttgcacctgtagtcccagctacttgggaagctgaggcaggaggattgcttgagtccaggagtttgaggctacaatgagctatggatgtgcagcctgggcaatagagggagaccttgtctcaaaataataatagtaataataataataataaacacaggtaactatctgtcttagaaacaagcaatattttgtgccaaaaatgcatttcgaggttaaaagggtagagttttcggttgaatacctttgtatttcccacgaatacttttgactgctgttgttgatattgattgagtttcagccttttgtctcttaaccaaaatcagaaaggctccatagtaattcatagttggggaaacaccactttggagatgatggcagggaataatgccagtgccattctttcacactatcacaaattatgtctgtttaggtgcagctcactctgcttactgccatagtgaagctgtttctcaagaaaccatcagaaacacaggagctagtccagcaggtcttgagtttggcaacacaggtaagaaatctggaaaaagcaagatgttgatttgtcttgtttcaaattgtaggaaattatgaaactcttcctaggggattcatttggggaagctttatttgaaggaagtatggcctttagatcctgttaaaatattaaaacaatgcctttttacgtgttcaactgaattgtagctaattctgtggcttttaaatgagttgactgattccagttttcataattcatgaaaattgaacctagactcttagtttagtgaaggacatacttagatgaaaatgacgtgatctgatagtacctgcttcactgtgacttcatttcagctttcaaatgaaagtaccatgtggagataatagatgcctcagtaaagtttcatgcattgttctaccttccagagtagttgcctttctcacagaaattaagtgtttatgctgcttccttgtattatttgatatatttggatctccttggaattatttgtttttttaggtcagaagaaaagaagtttagatggattcagatctcaggaaagtggcagctggctttaaatatcaggtcattatattagatccacagaaatcaaaataattaggttttctagtgtaactagtataatgatcatcagtccattgatgatttagtaatgttcataaatggatttgctaacaggccggctttttagcaggctgtcagagttacgatgtgtgtctgcaaatggaatatgattcagatatccagtttaccatttttctgtctttgtcatccctttatactggtgtgtaatcaaaatttaaaaccctttcacagtactttgcctagttctgagccataatttttcctgttactacaacttaaaaaaatgtatttgtatgagctttttgaagtattttaaaaactttcttaagcatcttcctctgcctgaagcaaagcaattataaacatcagtggttaatattatctgtattgaattgagcattctaatttcctggatcccatttgcatctctaagatgaattcaaaacaatttctttattcctcccacaccccccacagccttttttttttttttgtactctgtttcatgttttaattttaaactcctaagtcaggagtgtccagtcttttggcttccctgggccacattgggaggagaattgagaattgtcttgggccacacataaaatacactcacaatagctgatgagctaaaaaaaaaaaatcacaaaagaatctcataatgttttaagaaggtttacgaatttgtattgggtcacatgtggcctcaggttggacaagcttgctgtaagtggtcacatagaatgacattattagagcagctcacattctgtcaaaacaatttctaaagagaattttggcctttcttcctctctgcttactgtaaatattcaagcaagtatgtttagtagtttcctctgttttcacaagttctcaaccttatcatcattgtctgttaaagcctatgtgattgtatttaacaggcaccataggagagctgtattacgaattctggccagacttcaaactcagtctcattacctcttaagtatttatcaaaatttgactgagataaagtatttaggaaggattgcttaaaggatacaaggtagtgctgttcttacagatagtctgaaattcacctctgaatcaagcattattaatagacatctggatacctggactgcattgtttttgacccctaataaaattgcttttactaaattacgctgatactaaaatactatcagtctgtagtaataacagtcgtcatgggaaactaccctatttggatctgttgttagcttgttatcagagtcattacttacttcattatgttttcttctttatgaagccccatcaaatttctaacaagttttggatttttctgtgtatcagtgtagcatgcctgatcagctttcttttccatattggttgtttgaaaccttagaatcacatttaacaatctcccatggaaactatgtaggccactgtggcatgcagtttcctgactctgggtttaattaacgctctttagccttagatgcatttttcataagcttcctagaacaggacaggctagaaactcacttaatcctagtaagggttagtaaacgatttctattttatagatgaggaaactcagagaggcctaattattatggggcagaactaggactcagactcagatagtctggctctaggtcttgcccatggtcttgtccactgtgctatgcttcctctctagtctgaaggttaagaatgacttggagaatacctattccctgcctgaagcaatattgagcataagcccatatgtatatgtgtgtttgctagttttaaggtctttgtggatgattatttcatactataaataataagcaacttctcgaggcttgccttttttcaagactgagtctagctctgtcacccaggctggagtgcagtggcgtgatctcggctcactgcaacctccacctcccgggttcaaacaattctcctacctcagcttcctgagtagctgggattacaggtgcatgccaccacgcccagctaattttttttttttttttttccagtagagatgagggttcaccatgttggccaggctggtcttgaactcctgatctaatgtgatcctcctgccttggtctcccaaagcactgggattataagtgtgagccacagagcctggctgaggcttgctttttctgtccaattaattaatgaagtctgagaagttatcataaaacagtaagtatgctgctgggtgctgtggctcacacctgcaattccagcactttgggaggccaaggcgggcggatcacttgaactcaggaattcgaccagcctgtgcaacatggcaaaatcccatctctacaaaaaatacaaaaattagcggagcatagtggcacacgcctgtaatcccagctacttgggaggttgaggtgggaggatcgcttgagcccaggaggcagaggttgcagtgagctgagatcatgccactgcactccaggctgggtaatacagcaagactctgtctcggaaaaaaaaaaagaaagaaaaaaagaataagtatgcctatgtaagtctttttacctggaagttttctgttttttccccaagtttgtgaaataagaacctaaatatttatggctagtgagtaccaatttaagtttaggatgcaatgtggtcggctgaattgtgttaacttaaattggtatatgtgctgccgaagcgagcacatgttaacttaaattgggtagtgaggttctgatgatgctacttccactgattctggacatgactgagcaaatttctttcatactgcttttcttctgtctctatagtagagttaattaatactgttctttacctgtgctgagaattaagtgaagtatatgtgaaatcttagtgcttttaagtaaaatgggagtataattaaaaatattattagttagggggaaaaacccaacccttgaatctgaggcttcatttcaaaaatttatctttttctcttacctgttacacagaaattcaatacaatattcagttcaactgagtaaagaatacaaacaaaggccgggcatggtggcttatgcctgtaatcccagcactttgggaagccgaggcaggtagatcatctgaggtcaggagttcgagaccagcctgaccaaaatggagaaaccccatctctactaaaaatataaaattagccgagcgtggtggcatgcgcctgtaatcccaactactcgggaggctgaggcaggagaatcacttgaacccgggaggcagaggttgcagtgagccaagatcgtgccattacactccagcctgggcaagaagacctagactctgtctcaaaaaacaaaacaaaacaaaacaaaaaaatgtctagacgttagtaattattctttgtgatacatggaatagaagtcttcatgtttttctgtctatgaactaggggccaccatcatcagaatcatttgggctgcttgttaaaaatactaattactaggccctacttttgatgtaatgaatcagaatctctgaagtatggcccctgggttctgcactttcagtggcattcctggtatgttaaaatgttgatgcacattatagtttaagaattactgttttagtgctggcctggtaagtattgttttgggacctcttcccctgaggaaggcctatgggtctagcagtacagtagatccaaagccaaattatctgagtcaccaaacatttaatggcaacttaagattacaaaaaggtcctgtatttttatttatctcggtcttgacggtctgaattactgtggcctccatgtaaaatgtgaggcagttggtgaggactggcttacagtaggcctaacaggtcatccctcagaacgacagagtttgagcagttaggagattcttccctactcctgacttttcagccttgggagatttgcactcatttctcataggattgtatttttcaagttagtgtctgtttagactttgatccagtaactctatctccagtagtttgccatattgcagcattttgaataatctgtagaggaactctcaaatttttttcatatatatataatttttttttttttttttgagatggagtctcactctgttacccaggctggagtgcggtggtgcaatctcagctcactgcagcctcctccgcctcctgggttcaagtgattctccctccttagcctcccaagtagctgggattacagacatctgccaccatgcctggctaatttttgtaccctttgtagagatgggattttgccatcttggccaggctggtctcaaacccctggcctcaagtgatcagcctaccttggcctcctgaagtgctaggattactgagccaccgtgcctggctgagatttttgaattttgtgaatccctataggaatttttctttttggtcatttggttaaattgtttacattacatatgggagaaataatttgaagaaaaagcattttattttgatgagtatattattaaactatgtattataaagttgaatacctttaagatattactagtccataaagacaaactgaattttctaagttaataagataaatgcagtgtttaattatgtaataaaaaccatactttacaaattctaaagtacatgtgccttaaggactgcatatataggttaaaatttaacgtttaagttacatataaaaaaatgtgggagagaggagttgcttccctgacctgatattttgagaaacttgtattctgctcttttaaaaatatcaacttgtttttgttttataatgttcaagctttgttttcaaatgaagatctaaatgaggaggtttcaggctgctatttataaacacttaggagcaaattagtccctcagtgccccccctccccacacacacacaaacaaaatcaactaaattagatataattatcactgtttcttttttttaacccgggcatttcaaatactagagacattttgataagacattcatatgtatacatatacatatacacatacacacatttctattagaataatgcaagttataaatgtaaagattatcttgagataaaatttactgttttaatattttattaatttgctgtattgcaatgttctatatgcttttcgtctttaaccaccaatccattatgagtgcaatttaaacaatctgtgactgagaaaaaccatttaaatctatatagtcaaaaacatcagggtaactactgctattgaactggatgataagggccttaagtggctaaatcgtgaatcaattcatctgctcgcttagaaactaaaatggaagccctcagattgtcctgttttaaagaaaatgttttttgtttggttatgagttttttgggttttgggggtttgtttttttttttttcttttgagacagagtctcactctgtcatccaggctggactgcagtgacttgatctcagctcaatgcaacctccacctcctgggttcaaatgattcttctgcctcagcctcctgagtagctgggactacaggcatgagccactgtacccggtctggttatgagtttgaaatatagaaattgaaacagggacttattgttgcctttaataagttgctgttggaacaactcgtgcataaataaatgccatcatatagacatacttttgaggtaggtaccaggatatttattgccactttataatgatgacaaaaacaataaagaaaacaataggccagacacggtggcttatgcctgtaatcctagcactttgagaggctgaggtgggcggatgacttaaagtcaggagttcaagaccagcctggccaacatagaaaaaccctgtctctactaaaaatacaaaaattagctgggtgtggtggtgcgtaccaataatcccagctacttgggagacagaggcaggagaatcacttgaacccgagaggcagaggttgcagtgagccgagatacgccactgtactccagcctgggtgacagaacaagactctgtctcaaaatacatgcatacatacatacatacatacatacatacatacatacaaataaaacaataataaaggtagaaagggaaaaatgggcaacagtgaaaatgtccctcaatagtggactaataattaatggtgcagtgggcattacagtggaaaagtgcagtcgtatatatcaacatggagagcaacttcagaacagtatatataatatgaaactggttttatatgaaataagtgtgtgtgtgtgtgtgtgtgtgtgtgtgtgacccatctggacagatatataccacattactaatcatggctatttgggggattgggagttgagatggagaagggttggataattgggggagattttttttttatgtcacacacttaaaaattgtgatgtggtatgtttggtaataatttctttttagccatgaacatgtatacaattatttaaaaaccaccatagcacaaaacaagaccaccaaattcaagtgttactccttttggaagcagttatgtcctctctttagcagtttttgattatttagataatagtacctttcatactctattgaaatagttaatattacgtgagctccttaaagtcaggcagtgtattgttacctctttatttccagggcttagccagtgtctcaataggagatacttaataaatatttgaatgaaggaagaaggtatgggtacaatatatggaagatataatatatgttattaataagcctgctaatatttaaagcagttaaaaaaaatttcttttttttggaacggagttttgctcttattgcccaggcgagagtgcagtgaaacaatctcggctcactgcaacctccgcctcccgggttcgagtgattctcctacctcagcctgttgagtagctgggattataggcatgtgccaccttgcctggctaattttttgtatttgtagtagatacggggtttcactgtgttagccaggatggtcccaatctcctggcctcaggtgatcctcccgcctcggcttcccaaagtgctgggattacaggcgtaagccaccgcgcccggccctagtttaaaaaatttttatgtcctaaggccgtctcaaccagttaacttttgccagattaaacattgtttttctattctttatttctgtttgaatttgagtcttaggattaacccatcttaatttatagttacatcccttgaaacattagagattacagaattatgactatattaggaccatgttgagttaacacatttgtttgctttttgagacagagtctcactctgttgcccagtctggagtgcagcggtgcagtcatggctcactgcagcctcaacctcctgggctcaagtgatcctcctccctcagtttcctgagtagatgggactacaggtacatgcggctctacaccccgccctgataatttttgtacttttattattattattattttttgagacagagttttactctgttgcccaggctggagtgcagtagcgtgatctcggctcactgcgacctctgcctcctgggttcaagctattctcctgcctcagcctcctgagtagctgggattacaggcacacgccaccaagcccagctaatttttgtatttttagtagaggtggggtttcgctatgttggccaggctggtctcaaactcctgatctcaagcgatccgtccaccttggcctcccaaagtgctgggattacaggcatgagccactgcgcctggctggccctgatgattttttatattttttgtagaggcaaggttttgccacgttgcccaggctgatctcaaactcttgggtccaagtgatccgcctgtttcagcctcccaaggtgttgggattacaggcatgagctatgagctaccacatccagcctgaagtatcttcttaatacccagtctgcataaatcactacaacattggttgatgataaatccagcagtttgggtttctgtatggagaacagtttcatctccacctccttgcctttgccttttctttaggattctgataatcctgaccttcgagaccggggctatatttattggcgccttctctcaactgaccctgttacagctaaagaagtagtcttgtctgagaagccactgatctctgaggagacggaccttattgagccaactctgctggatgagctaatctgccacattggttctttggcctctgtgtatcataagcctcccaatgcttttgtggaaggaagtcatggaattcatcgtaaacacttgccaattcatcatgggaggtaagaaggtgtgaactgtctctgagtgagaaatgactcttgtttagacagcgttgctcttctttatgcttttatagtctggaaaagaactgctgtacatttttgcttctttatgcttttatagtctggaaaagaactgctgtacatttttggacacctactactatacaaccccagggagctccatctgaataccagtgaccacacataaaatcggtgaaagactcctctgtgttccaatctaggagtacattatggctttagaaaattgtggtgaagaccttctaaattgataaagtctgaaagttgcttaagtctgcagtaagaagagactagaaataaccccatagttgaaaacttggaaaaaagcctgtgtatacatttagccatcttgatccattactgtagcttttgttgagccttctggatagttagcaggtataacttatgctgtaaagctgttaatgaaataatatttcagtattgttttatttaaaaaaaaaagcctgacttctatgtggacttagtttttcagttacctgtacttttttatattggccatatcagcaaggaaattgttatgaaaaggctcttgggtaacatggagctcttgctttgtagctatcttaaaattctaattaggcagaagaaacactctaataaactcttacaatgggtatctcagaatcttttcagaatctgattccttcatcaatcatagtagaccttgattgaagtaggatttccttccagagtagttagaataattgggcttctattaatgagtgtcttgtaccattgtctaatatatattattgtttaagtggtttttgtgaatggccaaagtataggatttattgctttacaaattggcgtggtcagcattttgggttctatgtaaatagactgtggatacagataaaggaaaaaaaaaacagcaatacccaaggagattattaatctttcataattgagttgaatctttgggtttacagcaggtgctataattttaatccagaggagatgtgagcttcataaggattagtctttatagtaagttagggtgtttctccttgtaggcaaacatgtttaacattctatagatgagactatttaacttctaagaatttctcccagtctgtgcttcaagtttcgatgtagatacggattttctgttgtaacttccctctgtaaccgtgtttgtatctagcctcctgctaacttttaaccctcacatggaagtggggaaatgaatcaacaaacaaaaacaacgctttcttaaacacagggagagaaccaacatttaaactgtctaaaaagaaagtgtcttacataaggcctttatctgattaatagcctttaagttcttatcttcacaatttcttttgtggttcctttttggataacctcctttttgtcatttgtgcatgttttgtgttttttaaaaaaatgcaagtacagggaaaatctgttttgatataaatgggaatgatacgttgctgcaaatgacatgtctgtaatagtattgacattacctagctctcttctgcaatgtgaggttaataagtgatacacctctcataggaaacaaagcaacactttaaaccttattctgcatcttctagaggtttaaaaatactcacttcactaggtcttttaaaatcatctgggaaagagagaagtgatttttacttggatattgcttactatgcttatacttgtcagctgctctatgggggtgaggtagtaaatagttgtctaattcagaaaaatctcacctttaaaaaatattgctttaatgacagttatgcagttatttcccttaaaattggaaatgtctttatattaattttcttatattttccattgagaaagatgtataataatgatgtatcatattcttgtagaatctataggatcatttatatcttttcattgaactcactttatcttctcatattattcattcctttccattagagtgaagaaaaatatgtgcatgatacctattctaccttctttttagacatactgatagaaccatgtgttctgtcacattttctaaatggtatgtcagaagatgacagaatttcatgtgtagagaatactctgtgaaagattttatttatttcttgtcaggtgtatgaaatcatttcccctttttacttctttcttaaagccttttcatcatggcttcctggacactttccttgtaaattagctttcctagattgtatttctgtctttaatctttgcagttccatgtttcttctcttctctgattattaatcttggttgtatcaaaaggttcaatctgaaccctttctttctgtgtttctctacatattcccttagggaaattacccactgaccactaatatattacagagctttaccatttagaccatgttttcaattgatccttgctttaataaaaccttatgcttcagtgatattgttatcactgaagaaattttgtctcacagaggttgtcgctttccgaaaattatgcagctagtaattaatggagccaacacttaatcccctgtttttaccaccatcctacactgacccacaccctcatgatttcacctgagatgtgtatgtgaatttctaaccaagcttacttctctagctctgactgccagtcccttggttttgtttttgtttgtttatttgtttgtttgttttgttttgtttttgagacggactgtcattctatagcccaggctggagtgcagtggtgcaatcttggctcactgcaacctctgcctcctaggttcaagaggttctcctgctacagtctcctgagtagctgggactacagatgtgtgccaccacacccagctaatttttttgtacttttagtagaggtagggtttcaccatgttatccaggctggtctcgaactcttgacctcaggtaatccagctgccttggcctcccaaagtgccaggatcgcagacgtgagccactgcgcccggctggaatatgaacaggttctgaattatcgaccccagtgctctaccctgagactctgggcatgagccaccgtgcccagcccagtcccttgttgctgtcaggcttctctacttgtttttcttacttatcttaacagaattgaaacctgcacatataatttttcctgtcgtccttctagagtcccctgtgattattagctaatcttttgcttcttagtttttgtttgtgtcaaaatttaactaggcttttttaaagaaaacatttgttttttaattaaatttttacaattttttttactttttttttttgagatgtagtctcgctctgtctcccaggctagagtgcagtagcacaaccttggctcactgcaagctccacctccttggctcaagtgattcttgtgcctcagcctcctgagtggctgggactacagctgcctcctaccactcctagctaatttttttgtatttttagtagagaccgggtttcacaatgttggtcaggctggtctcaaactcctgacctcaggtgatctgccgaccttggcctcccaaagtgctaggattacaggtgtgagcctctgtgcccgcctgtttttttgttttgttttactttttatcatataaatcttaaaatatgcaagatagaatggtataacaaacttggatatacctatcactcagctttagcagttatcagtatcttgccagtcttatttcatttattgcccatacagttgtttttgaggtggctcaaatattttaaatccaatcccagacctcgtatctcttcacccgtaagtactgtacttggtatctttaacagataaagacttgaaattacaatgttatcaagcctaacaaaattggacataattacttaatatcatccaataagcaggctaacctactttcatattttctcaattgccattctctagtctcgtttagagtttatttaagatcggctttactttttccttaaatgtttggaggaattcacagtgaagccctctgagcctggaattttcttggtgggaattttactttttaaattgacatctaatttataataaccttagcattaaggttattgcctgacctttgcacggtcaggataccacggccgttgaacatatgtcactgggcaggcagtgcctctactactggtaatgctagcggtgatgtttttggtaaacaagctgggtaagatttgccgagttccttttactgtttgtaatctttccttagagcatacctgtgttggattaacagtataaataatagggtgtttattatattgtttattaatattaggctgtcagtggattattccggtctgatataagcttatgcagtggagaatatcttcatgttacttatattaacattattgcttctattaagtaatagattagtccaatctgttagtaatagattagctcgctaatcttagcatttagtgctcaatgaatttttacatatgtatacactcatataatcactaccctgatcagatatagaatattttcagcaccctagaaggttcctcgtgttcctttactgtcagtgtgcacactccagagattaccactgttctgatttctatcactatagattcattttgtctgttcctgagtgtgctataaatggaacctacagtttttactcttctgtgtcttgtgtcttttgctcaacataatgtgagattaatctgtgtttttagtagtttgctcctttttattggtgtgtagtattccattccatgaatataccatttatatcttctattgcacctttgggttatttctagtttgtggctgctgtgaatattcttgtatttgtcttttggtagacttatgtatatatttctcttgggcatatacctaggagtagaattgctggatcatagaataggtttctaattagctgtaggagacactgccaattttccaaagcagttgtaccagtgtatactctttctagcactgtatgagttccatacatctatctacattgtcagcaatgcttggtagtttagttttagttttagccattctggtgagtgtatagtggtgtcttgttatagttttaatttgcattttcctgatgagtaaagttgctaagcacattttcatgttactgtatcctcttttgagacttgcctatttttaatgatttgtctttttcttaatgatttgtaggaattccttatataatttggatgcaagtcctttgttagttatatgtgttgtgaatatcttctctcagtttgtagagaatatcttttcccaatctcttaatggtgtcattggaagacatgttcttaattttaatgaagttcagtttattactttttttcttttgtggctactgctttttgttgaaaccattatcttctccaagcttataaagatgctactctaggttttcaactaggttttacctttcacatttatgtctgatttatctcaatttttgtttaccttgtgaaccatagggggccaaggttcatttttcccccacatagctatccagttaacccagcaccatttattgaaaagatcatcgtttgtcctacctagtccttttaacatgtcttgaaactcaccactttctttttatttttattgcctgttgagttgttgttatttcatacattgttgattacagtagcagtttagattactcttagctgatcttcatgtccattctcctaacttcagtccgttatacacacaggtgctagaataatgtttctctaatgttatttttagtttctgttctttgttcaagaaataaaagtgattctgcatttcttatcatataaaaaatcaactcttggccgggtgcggtggctcacgcctgtaatcccagcactttgggaggctaaggtgggcggatcacaaggtcaggagatcgagaccacggtgataccccgtctctactaaaaatacaaaaaaaattagccgggcacggtggtgggcgcctgtagtcccaactacttgggaggctgaggcaggagaatggcgtgaacctgggaggcggagcttgcagtgagccgagatggcgccactgcactccagcctgggcgacagagcgagactccgtctcaaaaaaaaaaaaaaaatcaactctccagactagttttcaaagttttattttccttattctctcttcctccaaattttaccaatcccaaactctgctcctgccaatataattttttcaccacccctaaagtcaaattgttcatttctgtgcctttgtacaaaccttctcttcctctttggaggtttctctctggtagttcctcataaaaccattccgagaagcttttagaatcagcaccgttgattttgttgtgtttctctctcatatcctatcaattatgcagacacacaatacatgtttctgctgttacacagtaaacttgctttttattcattttgtaaatgctgatttttttgttggtgtgtgagccattcagggcaggaaccatatattttacagtttctacagagaaccatagaattctccttacagtgttccctcatagacgtttaattaaaattgaccaattatattatataactgacaaggtttacataatataatttattttcattttagcagctgtattttgataaaaataagaattgctattatctcttcatgaacataaacaaatggttataaaatcagagagtttttcccccttgtatttgatagttatatatagctatatgtttcactgttgttgcgatgttatgtcctaggtgaaactgacttttctcttttctccattttatgtgtatgtgactttagcactgatgcaggtgacagccctgttggcactaccactgcaacgaacctggaacagcctcaggttatcccctctcaaggtgatcttctaggggatcttttaaaccttgacctcggtcccccagtcaatgtgccacaggtgtcctccatgcagatgggagcagtggatctcctaggaggaggactagatagtctggtaagcatctttcttcccttgttcttttggttatttttagttcttgatatgctagagagttttaaattattcagctttttagaactagacctttccttgatgagcagtagtgtcctttgataaaggacaggattctttgtctttagtaagacaaaattataattaatactgttcatcatcggtaatggggtatgtctgcaagtgtatgggattatttcattgtcctgcctctaaatagaacttttgacatttaaccatcctattgttcagcaattttaatgtttagtatcttttccagagtttattattgttcctagctcttaactctggatagcccacataaattctccttttgacctgaacggcattaaagtgacctcacacaaatcatcctattttgaggctttcaaacctttgcctttttaatattttatttacttatgccctaattctgaaaggttttgaggcagcctttttttttcttcttcttctttttttttttttaagtaaaatgtacctttattacagttgggaagggctgcttgattggttctttttttcccttcttccccacctactccattctatcatacttccaatttaattagcttccaggattctaatactaaaaggctccaaagtccagaatacctgcgaacatttgccaccaatgggaaccaaaattattttttgtttctgtacaagataaatgaattttaagggtgaccatcaatctatgaagagaaggccagaaaaataacaagtctattacaagactgcctacatagtaggtacttaactgtggtggaattagagaggcttttctagctagacccttgcaaaagagatttttgtcaacccaatgactataaagatgcccaacaacgatttatttaccaatatcattggagggctgacatcttagatatgaaaatatgtgttcccagagatgacagacacaaaacaactgcactctctgctgcatatactggcatcttctcttctactttatgaggagttttatgtctgggatttataccagccagtagaggttcatttactttttggctagcagagagtctaaggaaatagggttatagtcatatctctgtgggttgtgcattttactaatggaaaatcactgcttctagaatttatacattgaccaagctgtggactccagcttatattgacacaaatgagcacttctgttgtctttcttgggaatataagcaaatactttttatattcatatctttaatgattgaaactgactgaatagcttcctcatatgatcattctacttatattgctgtatagcctccttatagactccggagagtgacaaatatttaaatgttcatggaggctcctaagaatcccttataaaattaaaatagctcttccttttctgttcacattcaaccacaaattaaatattgcatcctcctcaagtttattacattccctggtggggaagcttagtaaaggtggactcattgaacctaaaaatgagaaacaaagttcaagggatagaggggagaaagaggccctgccttttcatgttgccagacccaggaccctgcttgacccactataaacatagaaaaaaagagacatgttactttcatttgactttgtattagctcatgccaactccaaaaccaatgggttttgtcatcatattttacatagctgcccagtcatctgcattagaattcctgcaagtattgtatcaaagggaaaagctgttagaacctgcttggattgtagtagccaaagttgcacacaggcctatttcctttttttttatataagggatattcttttggggatgggaaagttgttgtttttctaattggatttctaaatatgcaacctttgctagataggcccagttatgtttttatgtaactctaaattttaacatttcctgactttgggatctaaaatggtatccttggtgttacagccccagaaattgtttacagtgcagttttcttcagcttattctgagattgaaagatatcccagaaatcaagatgagaagaaattaaagcccttatttttgctttggatccgtatgtggttaaatatatattcactcagagaatcaaggttcctttttcgagaacatcacaaggaagacctaaatttgcctgtgtggaagaagatgagtttctaaggcggcagtggacttttaaaatgcttttattgttcttatgcaaattacctaaagagaagattaatcctcaaagccattttttgaatgcatccttgccttacagagtgcttctcaaaataaattatataccttgaatctcctaaagattttgtacaagagagggtttgttttgttttgtttagtttgtggaaatgggttctcactatgttgcgtaggctcatcttgaactcctgggctcaagcaatccccctgccttggcctctggaagtgctgggattacaggtgtgtgagccagcacactgagcctgcaagagatgatttagttggtctggagtgagacctagagtctgcgtttctaacaaggtgacactgaagctgctggtccatgggccacattttgcatagtaaggacatagaatatcttgtgaccactgtgaactacttcagtttagtgtttgaactgtagctacctagatgctcagatacctttttctttttctctctcttttttttttttttttttggaggtggagtttcactcttgttgcccaggctggagtgcagttgtgtgatcttggctcactgcaacctcacctcccaggttcaagcgattctcctgcctcagtcttccgagtagctgggattacaggtgcccgccaccacgcccggctaattttttgtatttttagtagagacggagctttaccatgttggccaggctggtctcgaactcctgaactcaggtgatccacgtccctcagcctcccagattgctgggattataggcgtgagccaccacgcctggccctttttctcttgacttcagtagtaaacagacttctggaaagagggctcctcctctcccttaaattaattcagagggcaagaaacttattaaattattttgttaaagctctttcttttgccctgtagggagaatagtgtagctaggagtggtagaattcaacccaaacccctgtttaaaatatggccatagttagaattgtgtggtggtttgggaagcagcgtttaggttagctcagtgatcatttcaggaaggctatcaaccaggccactagactgttggttctatttttatcatgggtttctaacagaacctcacccatagaggccagtggtgtactgctaacaaagtattgcctggttcctgatgaccatatggttctcaactctatctgcagaattggtcccacataattaccagtttaaaaaaaaatactctctagccattgaaactataaagaaaaaaaatactatcaatacttgagtccaggagtaattaaataccacctctgggaggcaggacctagacattgctatttttaaaaagttacctgggttattttaatcttgcagccagtgttgagaacattaaaccaaatgaaattccaaatggagttaggtagagatgttaaaaactgatctctaagccaagacagtgaccgccacagaagaatcatattctcgagatcctctttggcacctcctacaaaaacagatatctctgactttacttttgttcttttccccctgaatatttttctgttatgatattctgtgaggttatccatcgtgtcagaagttgactggaagttgaatttgaccaatttagatatggtcgctcagtcccagggtcctttttatccttgcttacttgccataattggagaccgaaaattgagggcattttatattttggattgtctaaccattttctattcttctatcttaaaacttgatattcatgagaagatatttttattcttcctttttcatagcctggtgatcttcccttagatcttgttctgtttcatcttcttttactgtcacactcataaaattcggccagcgttaagatgtagtgagttgtgaccttttcttattaggttggagcaaaagtaattgcgatttttgccattaacagtatttacttttgctccaacctagtagaactgtcacagtcaggaaatacttatcaatttattatttatttgttgatatttctagtcaggaatgttttgccacaacattcctgaaagctgtggccttcctccatcaatagtagtgactctcaacattggtgattctttaaagaggagtagggtgggccattgctgtgatataaagaaagtaaacatactgtagctccccaggtgattgattcttgtatgcttttttaaagaaagcagacatctttgaatggaatgcctcttcatctcaagacttggataaaaatggatttctacctattctttttagtctccttactgaaacatccttatttttttatcgcatttcagcatattctcttttgcttgtactctacaggtagtttattccatctgtcagtacaaactgaactatcgctttgatgtggagtaaattcaagtaatgtagtttatgcagttgatctgctctacatgtagagcatgacagtttactagttaggtataggcttgcttgcaaagtagttatttgggctttttttgtttcctttggaagccatgtatgtggagttttttgggtttgggtttgtttttttttttttttttttatgactctggtacttaatctaagaaactgctcgttctgagtagtgtgatttttctcaccgtgcagatccttctggtttggtgtagtgtgggaggtgacctgatgcccatgtgtataactcttgcatatgtgttatgtgctcatgagtctgacatctgcgaggatcactgaagtaataattgaatctcagttattttcttgcctttacttccaatctgtcagcagaggccttggctaaattacagccttttgttcatccaaggtgctgtgcattattcttttacataaacagtgctattgtgtatatcaaaaatggaaaggaagaattatccaaagtgccctttctctgtgctgatgaaggatttcatcctggagaaatatgctgtgtgcccagcttgagtggtatggaattgaagagaaactgccttttcctgaccctcagtccatgtttttcccactgtttctttcaggtttttacctttcagattattaagtcataagctatttattaatagttttgagattttttagcccacaggaaatccatcatctatactagttttgcatctttatttttcttcctttggaggagctttgcaatgacttaaaagtttagtttttagagtttgtgttatgtggaaagatctttgtaagttgttgcctgttaaatttctcagtgaggcttccataaccaccatctttgtatcagtgcatacgtttagtcaaggctggcctcagacagttttgagaataattactaatttctgagttctagtccctgtgctagaatttttataatttctaatcctcagaacaactcaagaagataattggtattggaccccattttacagaaaactgaaggtcatacagtaagttgcagagttgggatttgaacccagggcttctttaaaacttcaaagtttgtacactttatactgtcctatgattttccagtttgtttgttattgtcatcttgcagaatagaatacagtttcacctaactggtccttctcaaactgggaaatgcagtctctggagtacacagcagagtgcagggtgcatttgaagctgcagaataaatatggctcattgtcttgcagtgtcagtcttacttgatggtaaataatgtaaacagaatatacactggtgtgttaccacttagaatgtaaaattgcatgactttaagataaaaaatacagcttgcttgccctgggcctcttgatggtgtacatcccaggtccctgagtatatgagtttgggttaatgtgtcacatgaaagttggagaaggactacagaagtgtgttcattcatgaagaaaagagactgaataatgagtaagttcatgcacctttcttgcagcaagaggaacagattgttcatcttatccttatttatttatttaaagacagggtcactgcaaccttgagctcctgggctcaagtagtcctcccacctcagcctcccaaagtgttaggatttacaggcatgagccactatgcctggtcattttattttcatttaagtaaaaccacaaaaatctccgtttcccatctcttcaccagtgagctgtaataaagcagtagtactttgagggcagttaaatgatgtgcaggcattcttcttctgaaaatttcctatcaaaaccactcaaacaatacatttcctccctagaatgagttttgacccggctgggagatgtttgtttatttatttttttgagacaaggtctcgctttgtcacccaagctacagtacagtggtgtgatcatagctcactgcagcctcaaactcctgagctcaagtgatcctctaacctcagcctcccaagtagctgggactacaggcacatgctgcacacatggctaatgggtgttcattttttttcctcagttggttctattcatatgtttgtcaatgttgatgcagatattgtgctctaagtaaacaattttgtcaggcttttgtccttttggtgataattttccctaataaaatgattcacttcaagattgtctcccaggaaatactgccagtagccatatatatattactgccagtagccataaatttatatttacgaaacattcattcattcaataagtaaatatttgagtgcctagtattcaggctctattctgtgtactaggcatatagaatggtccttgcaaccttacgaaacagtccttggaagcttacattcgcgtaggggagacaaatgataaagtagcaaatgctgtgaaacaaagtgagacagaataaagaggttctcttgttgatttttactatattcatcattgagttctgtctgacctaagagacctgtggtgaccattctaaggactttttgtcttacatcaggaagtaatccgttccatccccctacttttccactgatagaagccttttcccccctcaggttatggagtcttctgatgatttttatatgatctcaatgcgtttatgctattccttatcaagtctgctcttagccatcagtttattagcttttgcatggttacagagtctttccaccaatttgattaattatattttatgatgctttttggaatagcttttttttttttttttttgagacaggatctcactctgtcacccaggctagaaagcagtggcactatcacgacatactgcagccttgacctccctgggcccaggtgatcctcccaccgcagcctccgaactagctgggtctacaggcgcccaccactacacccagctaaattttgtattttttgtagtcatggttttgccatgttattcaggctggtcttgagctccggggcccaggcaatccacctgcctcagcttccgtaagggctgggattataagtgtgagccactatgcccagccttgaatagctttttgaagatcatattaaaatttgcagcctagtagctaaaaaccatactttaacctacaagatactgtgtgccatctaaaatttaaactctgttagaaagacacacactgatggttttgataccaataggattttgacgatagttaagttttattgtttgtgaagggaatcattgtatactatttttgcaccattctgttgactcctgaataatagagctattggtaagctatatggcttggagcattccttagattcccttcaattcagtaagttctagaaaacagtaaataaaagagacactagctctaaacaggagcatagaaatgtctgagcttaagatatacacctgcagttaagagaatgtcttcagatacctagacagctccacagttttagaagcaaacagatgtactttggactggccagacataggtcaaaggggctaacccagatcagtcattatgataatttgtgggattttttttccagtccgctcagtggttatctcagatgatattcctttataaaatttaaaaattccttttcaaattttcttttcttggagtcaggcggatttattcccctatataacttcaatcttgagttccttctctgtatttctgctgttgtagcacattgccattggacaggggcatttccttttgttatctatagctgaactgagcctgtatgcgggctcagctctgagacttttggctctacctggctctacagagctcatgtaaccatgccgaaatccctttagcccataagttacaataagtcaccataaaacccctgttttctgtccagttactgaacattattgtgcaatgacacattattgtgtagtttaacatgaaccaagttccactcagcattacttcagatgtggtaaagtgaccactctttggcagtagacaaatgttagtattattctcagtgccatttaatgactacagcaattatgggggactacaccactagcagaaaatttggatttaggtatcagttacagatttttaatacagactgttcaattctcagtatttgaaatattcttttcctgaagttgccgtctttcccccttctttctgtatctgatttagttgacctataattgacatcattttcttcatggagaaaatggcagcctcagtaaggcaatcctgggaacaatagtgagtggacacctccaagagacacttaaaacacagtatctagacatttaagatcaggatcaaagccataccctgcactcctattccttttccctcctgtctcctaccagctcactggataacagatatcactctgagttttacaagttctagtttgattgattttgtaccctacctgataagtatgggcttagagtatgtccagacagatgaacctgaatcccaataatctcaggctgggtgcaatgattcatacctgtaatcccagcacttcatgaggctgaggtgggagaatcgcttgagcccaggaagttagagcccagcctgaacaatgaagtaaatttttttctttaaacaaatagtgtccaactgaactgaaatagctactgtctagttcaggctgatatacaacaactttcttgtgtagttgttcactttctagctttcttttttcttgatgagtatctccttcctcctgtttatcacttgtagataggagaggccactcactgggtaattcgcttccattcctgctgacatctccctattagtcactcacacccatcatcatgctgtcaccttgccatggtttcagagagtaggataatctccattagaatatttttcagttaagagggaagttgctgaatagtccgcataagctgtagtcttgctagttagaaaacatgtatagtattgaaattgtcctttccctttgctctctgaacatagtacaattaggtgaacctttgtatccctggctgtgtctctgatatcttttggaccctgtctttgtgtcagatcagagttcatgtttctagctgagttgtatctgatatactgaacataaacagaggaatgtcaagattgcttttcagttcttcatgattttgaataaaattgacaagcactgggggacagtactttcagatcctttccagctaagataatattcatatatcattcaacgataaaaagaatgaaatctaagaaaataagggctatgaatgtgctttctttcctttggtctaaacactacccatgaatctcttttctcaatgccttttattgaatttagcaaaactgctgtttcctttccaatgtgtttttctttcttgctgttctgtgccaagcaggttcataaagaattctatctctttgaatcttggattataagcctagccagaagaggggagaataagttgcggtgagagggggtaagcccatcagaaagtcgaaaaccacctcagagtatcaggacaaatgaaacatttttcgtaggatcctttccatgggttttcctcgctgctcaaattttttttttttttttttttttgagacggagtcttggtctgttgcccaggctgtagtgcaatggcatgatctcggctcactgcaacctctgcctcccaggtttaagcaattctcctgtatcagccttctgagtagctgggactacaggttcccgtcaccaggcccagctaatttttgtatttttagtagagacgggtttcaccatattggtcaggctggtcttgaactcctgacctcaggtgatcaaccggcctcggcttcccaaagtgctgggattacaggtgtgagccaccacgcccggcctctctgctcaaatcctgacttcctttttattcacaagttccaaagtcatttctgagcagatgaagtcttgtctgactctaaataactgattctctaacggcagtgttttcaaccttggctgtacattagaatcaactggggaagcttttcaaaattctgatgcccaggctacaccccagaacaattaaattaccatctctgggggcgagtactttttaaagcgctactctctgcaacccccacacacagatggttgattccattgtgtatccaaggttgaaaccatactactgaaacataattgacatagttattagtattcttagaaagcttagtctaagaaacctccaggtttttatgaaggggaaattaaaaaattaaaagacagcctttgcaaacttattttgtatgagtatttttttaaaacacatatcaaccctgtgttccagtctaactggccttttcattcttccatgctttcttcacctttgttcatgctatttgagaaatggccttcccccatttttgctttttataattccaccctaccacctttttgaagtttctcttcattctttcagccagagggaggttcttcccttcagaacttcgcttttttgctttagtatattctgtatggttttgcatttgtgttttatttctccagctagtttgcaaagcttcattcttatctatgtagtcccctcattgccaggcatctttatatcccttgtaatgccttgcatccagtaaatgttatgtaaatgtttgtttgaataaaaggaatttcagacgtcatgctgcagatgtgtgctatgatagaactagggagaaagcagatgtgtagtatcttttctattcccttcacacttttctagttactcaaattcttggtttggggatgccttttttttttttttttccgagatggagtcttgctcttgttgccgaggatgaagtgcaatggcatgatctcagctcaccgcaacctccgtctcttgggttcaagggatgctcctgcctcagtctcccgagtagctgggattacaggcgcctgccaccacagcctgctaatttttgtatttttagtagagacaggatttcaccatgttggccagggtggtctcaaactcctgacctcatgatccgctcaccttggcctcccaaagtgctgggattacaggcatgagccaccacgcccagccaaggatgatctttttatttatttaagtatgtgattttcatcccctgtgcaaccattaagtagtcttcaggaatcagattctggaaatgttagctctggtttggaatgcttatagtttacaacagagcatgcttgctaatgccagttatgaagcacctaccagggttattttctttcatggtttaaacagaactttgttgtagtcgtcactatttttcaatatttaagattaatttttagatttttgagaatgccattttatgtactactctctgttcattgagaagataaatcctctttccccaatcttaaagatgcaaaataatttttacagctcaacgacctgcaactttctaccactaaatgactataaaggagaatgtgcttagaacagacaaggcatttgatgattcaaggaagtgttttagatgcacagtaagaactagggaagaaacaactgtggaactgtagcaaaaagtagattttgctttttaaacagctccattagttgtgtttatgtgtgttttacattgcctatatgccacctattttcagcttgagttctttaatgtttttgtcaaggaagaccgacttcagagtgaattatatctatcagaatcctgagaaaaaaagcaagactaagaccatgtggagttattttcttgtcagctaggtaattcagttagtctgattctctaatgcgtaacatcctttttaaatgatctccaaataaatccacatttctccttagtagaattgactgtgaaagagatttgaagcactgcatgcttccccacttcctccttagatagttcagatattttcttttttaggaacattccaaactctaaaaatcacttttgttccacctataatttttgcagcttgaagttgcagctcaatactagtttggctcttactttttcagtggggcagcaggttttgtaaattaaaacacattaattgttttgttttttggcttttccttttccaacacctccccaccctttccgtccgccccccactataagtttccttttaaagaaaaaataaagcatattcgaaatattgccgcttggggatagagcgtcttagaatatgcaaactctttaaatcttgtttgggtttgtgcctgtgtaccccagtgcaaagattggatctgaaacatccctgagatgtcccagctccgtcttctttacaagttttctccaaactgatacaccatcactaccaccacttagttcccctagtacatatttctttgtaatctagaatttttttaggctttgggagacaagttgaatggcatgtatttccagcaacttggtagagcaatttacagattctatatgggcatctagtatttagctaaatgaactctacctctctctcctctctctcctttctctctttcagcttggcagtgaccttggcgggggcattggaggaagtccggcagtaagtgccatctgtttttttcaccatgagaagcactgccccctgtttgatgcctttcctatgtacacattatcagaccagccactgctgctgtctagcactgcacaccaaaacctctataacagtatatgggtagtagaaagtagtatagggttacttggaattgttggggtcatgcaccacatggtgtagagacatctttaaggtttaatgttccagtgcctatagagatctttgtctttctgatattaaagagctaaaggaaatggacccttccatcttgactggagaatgcttattccctggtgtcacctagaaagaacttgagagggtcagctggactcagagtgagactctcctcgtaaatgagttagtttcaggggtgtgaatgtccatctccctgaggagagcttcctactaggtatttatgcctaaatgggaaaggaaataagactttgctgaacccaggtggaaatggaactgctgtttaagttggatacttctccctctttctataaaaacaaactcctttcttagggtacccgtaggccttttgcacagaatcatggaagctaaaattggaaacaaatacaaaatcttggatcactgtgttcctgtatcctactgagtactctcttgataaagcttctaaagaatgtgtgttcttatcaatgacgaaaaaataactgtcatgattaaaaagatgaagaatatactaatttgactcctaagaatattgtaattatggtgttttcttattgatttatcaaaactactaagatatatagcaatattttaaggactgttaatctgttcttcccaatctcccctctcccttttttttttctcctgcaggtgggacaatccttcatcccatcatcggtgcctgcaacctttgctccttcacctacacctgctgtggtcagcagtggactgaatgacctgtttgaactctccacagggataggcatggcacctggtggatatgtggctcctaaggctgtaagtaaagagttaacatagcaatactttcttaatggacaggacccaaactgtttcactttcaacatttgtgttacttctactggtaataaatcaaaggtttgggcccttgttctggaggacttagaggaagatgaaaggtggcttcaaacttagcagtaggaagcaccattagcatccttgttaaacatttttataattagacttaaaatttgacatattaattatttgagttttgttctcatgtttagaaatattgtctagtttgtcaacattgaagtcaatctagtgaaaatctagtggtatgtagtgcagcagcaggagaaaaaaatgcagagaagtcatttctcttattcctctttccccattggtattacgtatggattctagaatgccactgctcagatgtggttttcatggattttagtgtacctttttagagttccaatttaggtttgtgtcactggggctcttcttgtcttgtcttaaccttacttgatgtcactcacattgaagttcaagaggggaaactcccggttaatgaagctcatttaagcccttgggaaaagcaccatccaggctaggccaggcttcatacagtcttacctttctgaggaccaatttggctgaattctctgctttctaatctgactccttatgggggatccctgctatagagatgtagaccagttgtccattccaggagttgtaactgtgataactgagtgtgtatagttattacagtacatagcaaaaccgaagatattcaaaattgagccatagtgttttggcacaactcggtagctttgttgtaaggtttactatatgggatattatcttcagacttttaattattagttatctaatgcactcatttactaacataaaagtattgtatacaaatgaccaacgtaaataatgtaaaaatgtaagaaggaaaattgtctccccctgcccccatttcccatgtatagccactgttaactttcttgtgtgtcctttcaaaagaaaaagatcatgcccatagctgtatatttgtatcctttgaacattccgtgtcagtgggatatactattttgcaccttggtttttctctaccatattcttttgaatccgtatatctactgaattgatacaccataatttatttaatcactcctctgttgatgaacatttaggttattccctggtcctccccaccacctgccactcttttagtatggctgagtacattatcatgattattcaccacccacagatcctttggtattctgtcttaggtggtcagaacagctcatgactcctgatttttttattttatttttttttagacggagtctcactctgtcgcccaggctggagtgcagtggcgtgatcttggctcactgcaagctctgcctcagcctccccagtagctgggactacaggcgcccgccaccactcctagctaatttctttttgtatttttagtagaggcggggtttcactatgttagccaggatggtctccatctcctgatctcgtgatctgccctcctcagcctcccaaagtgctgggattgcaggcgtgagccaccacgcctggccttaaatttttttatctttatttttttaatagtataggccaggtataccacaggttccaggaccaaggggcgtgttatgaattatttaggtagataaaaagaataggcattcagattatatgagcaatatctgagtatttactatttaccacaaactatagcaagagttaaaaacgtatataagacatagtcgatgcctttaagggaattaccaataatggctttggttggaaatgatgaaaaaaaatcttcaaagattacagccatgctgttttcattagtagatgcagtttcttccctttaaaccattttaccaaaactaacagaaaaacacattatgctcattggaatttttcttttcctcttggtagcagtacttaaaagtagtaaaataaccaagctgaacagaaggtagagcagaagccagggtcgtttaaagactggttttttaaaattattattatttggttcttaaataattgagaacgatctcaaaattcagaaaataagactctatccggagtcttttgcactggcttgatatttatagtataaaaattactataattgcctaaggaagtgaatttgttcacttaattgttaatcttaatttgttttttatttgttaaaaaatgcatagcatcaagataaatcttgtctgattctattgagctttatactgtgtttcaggtctggctacctgcagtaaaggctaaaggcttggagatttccggaacatttactcaccgccaagggcacatctatatggaaatgaacttcaccaataaagctctgcagcacatgacagattttgcaatccagtttaacaaaaataggtaagcaatctgggtccctagcttgatgttgagacaacagtttgccttagaaccaacaagagaacattccatttagcactggttaaaaactcacatattgggccaggtacagtggctcatgcctataatcccagcatttgggaggccgagacgggctgattacctgaggtcaggggttcaaaagaccagtctggccaacatggtgaaaccccgtctctactgaaaatacaaaaatgagctgagcatggtggcaggtacctgtaatcccagctactcaggaggctgaagcaggcaaatcccttgaacctgggaggccaaggttgcagtgagccgagattacgccaatgcactccagtctgggcgacagagtgaaactccatctcaaaaagaaaaccaaacctcacacattggcagatgctgtatgtagagtgagccctggctcttgcaagccttttcagttatcagcttcaactctggaggcactagggagtttgttgggaaactcatccaaatgcgatgaagaaaccagaacttatttactatcttggattctaggattagaacgtttttgataaatttttaactgaaatccatttattcattcaacaaatcattgtttaacattagcatgagccagacatttctaggtactggggctagagtagtgaaccaaacaaagctcctgactgaaagttcacattttggtgggggaaattagcatatttggttggtataagaaatatggaagtatatatgctgaacaaataatcacataaaccttgacaacctccttttagcaatgaattctctgccttaataaggaagagagcatgaagaagtaaaatgttaatgtcttattctttttgaaacatcagtgggttttattcagttttatggttcaggaaaatggctgttagaccttaatggcatgtccattcatttgtaaatacaggatatttagccctgcatataaaaagtagtaattggacccttaaagcagatttcataaaatttgtcaatgacaatttgcataagtgactgtctgatttatttctcatcatttggaaacacttttgtactctggatttgagagcttggcatgttaaaaatcatttaactatctagaaagtctgtgtttctttctgtcaagactaccaatgtttccagccatttttgaggagctggccctgttaaaggccagggctgttgggaaaataaataaataggccaaggctattggtggaattctgttgtaataaaggaaatctgcagatgcagagtctgcattcatctctagcctttttttttttcctttttttttttttgtggggggatggagtcttgctctgttgcccaggctggagtgcagtagcacaatctcggcggctcactgcaacctcttttgttctgttccattgttttgtttttgtttttcttctttggggttttcaattattcatttattgactctttgtttatcttttatatactgtttttctctctaatcgttaaaaaaaatcatcaaattcttttatatcagcaaataaccaattagtgtcagattttcacagttgtctaatgtttttgtactgtttactttgtctgaacagggtcccaataaggtcccatacattgcaattggatgataagtgccttaagtccctttaaatctataggttcctcctcctcctctgttttgttccttaaaatttatctcctcctccttctctgttttgttccttaaaatttatctgtagaagaaattaagtcttttagtgtggagtttcccacagtctcaatcttgctgattctacctgtaaattggaggcagattatagatttaatcagatttaggctcatattctggcagaaagccttcataattggtggtgattgcaaatcctgtttctcttttagttatttatttttctttttctcattttattctctatgtttcttaccatgtttactatgatgtctgtttccttgttctttgtaagtcagtctttttgtcactataattgtaccttttctataattttttataaatgaaattacataatatggaatcttgtatctggtttctttctattagcataatgcttttgaaatgtgtatatcagcagttgatttcccttttgttgttaagtaatactccattgatgaatatacagtttgttgacgtgctcacaagttgggggagtttggttgttttcagtttcatctttatgataaagttgccatgaacatttgtgtatacatctttggttggacatatgtttttgattttccttggtaaataactaggaatgttattgctaggttatatggtaagcttgagaattccagatattccacatcctcaccaattttagccattcttgtcgctgtgtagtagtgtctcattttaatttgcatttccctaatgactactaattttaagcattttttaaaataagcatattggtcatatatatctttcacttaagtatcagctcaaatctttgccttttgttgtttttggggggagagagaggatcgtcttattatggagttgttaaagttctttgtatattctggatacaaatcctttattgcaaatattttttcccagtccatggcttgccttttcttaataatgttttcaaaaaaaaccaaaagggtgtttttgtttgtttttttgtttgaaacaaaggcttgctctgtcacccaggctggagtgcagtggcacaatcaaggcctactattgcctcaaattcctgggcttaagtgattctcccacctcagcctcctgagtagctgggactacacctgtgtaccaccacacccagctaatttttttatttgttgtagagatggggtcccactctgttgctccagttggtctcaatgtcctgggctcaagtagtcatcctgccttggcctaccaaggtatgggaaatacaggcatgagccactgcacccagtcgaaagttttcaataaagtcaggttcatcagttttttttcttcttatgacttaggctttttgtgttctaagaaatctttgcttaaccccatggttacaaagatttttttggcatgtttttaaatataagccttatagtttttgttcctacatttagttttataattcattttgagatcgtttttaaatatgttgtaaattaagagtcaatgtaaaaactttttccgtaataggtcttgaaatcagatggcctaagtcctgcaactttttttcttttcaaagcttgttttggctattcttggtcttttacatttccctgtaaattttagaatcagcttgtcagtttctacaaaaaaaatgctgagatttttattggaattgcagtgaataagtagatcaatttgagggagaattgacatctaaacaatattgagtcttctaatccattagcatagtatatctctctgtttaggtctttaatttctttttgcaatgttttataatttttttatgcacaaatcttaccttttgtcagatttaagtatttcaaatttttgatgttatagtaaatagttttttttttttttttgagacagagtttttcgcttgtcacccaggctggaatgcaatggtgtcatctctgcccactgtaacctccgtctcctgggttcaagcagttctccatcctcagcctcctgagtagctgggattagaggcacccgccaccatgcccagctaatttttgtgtatttagtagaggcagggtttcaccatgttggccaggctaatcttgaactcctgacctcaggtgatctgcctgcccttggcctcccaaagtgctgggattacaggtgtgagtcactgggcccagcagtaaatagtatttttaattttaattttttattattgctagtatatagaaatataattgatttttatatattgaacttgtttccttcaactttgttaaacttactttttctttctagtggcctttttgtaaattccttctagtttcctacataaataaatcatgtcatttatgaacagagacagttttatcttttcctattcaatcttatgccttttattttttcttcttgtctgattgtactaacaggacctccagtaaatgttggataggagtggtaagaaaagtgttctaattcatgggagaagcattcagtctttcatcattaagtgtgacgttagccataggtttttcgtggagcttgaggaagtttcattctgttcctggttttctgagttttattatgaatgggtattaaattttgccagatgcctcttctgcatttactaaaatgattatgtgaacttttttagtccattaatatgatggattacatcagttgacttttcaaatgttaaaccaaccttacattcctgggataaatcctacttgtttaggatgtgttgtctttttttgtgtattgatggagttcattggcagaaacttttttacatctatgttcatgatatatttactcttcatttctgatatgatttacttttttttattatttctttcctgagttagattggctccctttaccttttcctgttgtcttgccctcacctcacattatctggtcatcccttccccagatgttttcttttactgttgtgtggtcttccttggtagctagcattgttgtttgtttgtttgtttgttttgttttttcaagtatgttttgtttgtcattaaggaagttgtactgctgtctttccacttttttataatagggctttgaacagttgctgtgttttttaccattatgatacttatatttgaatgagttggaatttgcaggactagctattagtagacttctatagaaaaggaagctaggcgggtagttttttagactttgctcctcaagaacgtttccttctttgctctggtgtagccacagcttcttagcctctctgaatctaacttgattctagagggctgatctttgccttcaagccctgtctttcaaggaagccctgtcttccaaggtgtttgttttctctttagaaggtggtgctttttgagctctttcatctccagggcccccttggtagaaagggacttgctaccttttttttttttttccagccttattcatatgctgctcctgtttgatcttggtctactctgggaatggggctgtcttctgagaatgaatatttgtggtcagtctctaagacctactactactggtttcctctgaactccttgtgcctgcctactgtatcaccagagcatctcaccagttctgtggactttctttgacagtagttttggagaaggtgaaattacagctttatagggactttttcccccttgtttgtttcctctatttcatttcttaaatgagcacttggaagatttggaaccatgctgctgccatgtttcccaatattgacttaatgacagagttttgatgactgtgagagcaaaatcaaaagagtaaaattttttttgccttataactattatgcctaaatgagtgatgtgaattctcaagatcatttcattattacaatttggtagtcttaagatgtagtttatctaggaaaaggaaaatatttctttagccactctaactcttggaagagtatgtgtgtaaactcttttttttttttttttgagacagagtttcgctcttgttgcccaggctgcagtgcattggcatgatcttggctcactgcaacctccgcctcccgggttccaagtagctgggaattacagacgcccacgaccacgcccgactaatttttttttgtaatttttggtagagatggggtttcaccgtattggccaggctggtctcaaactcctgacctcaggtgatccaccagcctcggcctcccaaagtgctgggattacaggcgtgagccaccgcaccagcctgtataaactctttagttaattttataaacgtcgtagtcccatcttccatcatgtggctatttagaatataaattcaatataaatttgtatcattttgtttgttatcttctaggccaattttttctttctgcttcatctttataaaattttgttttcttcttttttttccacccgaaacagggtcttgctcttttgcccaggcatggtgcagttgaggctcactgcagcctcaacctcctgggctctcaacctcctggactcaagtgatcttaccacctcagcctcctgagtaacagggaccacaggaacacaccaccacactggccaatatttgtaatttttttccagagacagggtttctctatgttgcccaagctggtcttgaactgctgggctcaagtgatccactcgcctggcctgggtctcccaaagtgttgggattacaggcatgagccaccatgcccagtctatggttttggtttttttttttttgttttttttttttttttcagacagtcttgctctgtcgcccagcctggagtgcagtggcacaatcttggctcactgcaacttccgcctcccgggttcaaacaattctcctgcttcagcctcctgagtagctaggattacaggtgcctgttacctggctaatttttgttgtatttttagtagaaatgttgtttcaccatgttggccagcctggtctcgaactcctggccttaagtgatccgcccgctgcagcctcccaaagtgctgagactacaattgtgagccactgtttccagccccagcctataaaattttatccttatgcttctcagaccatctgtcctcccacatatgtatttgttttctatttaacttcagattcagactgagtttcccatctctttaccattcttatattattaaacaagttttcctggataaaactggtagctattcattgcctgcctgaagcttagaaagtggccatgtttggctctacaacttatcctaattgtttggaatttataagccagtcaatgccacttagactagctctttcccagtgattgtgtcctatgtaagtgaaaaaaaaaggaaagtgagaattaccagtaaataatcctctggacttatcagtcaggttatcaagcctgtaaaataatttattatacttctctttacagagtagaaattggttttcgtttttgtttttgtatttttaaagacagggtgtcgctctgtcatctaggctggactgcagtgatgcagtcacaattcactgcaacctctaatgcctgggatcaagcaagtgattctcctacctcagcctccagagtagctaggactacaggcgtgtgccaccatgcccagctaatttgttttcttttattactttttttttggtggggggtgggcagtaaagacacggtctcattatattaagtgaccctcctgcctcagcctcccaaagtgctgggattacaggcgtgaaccaccacacctggcctcagggtggaaattcttaattcttctttctcccaagaattatctaaggaaagatttattaaaaatgatattcatcaaacctgccctctagtgacgttttaaagagaaggaactttcagagttatagcactagcaaagcagttctgcacttaagaatattttctccttcctcaaattcatttaatggaaaacagaaaattatgatgtaaccagtgttatagcaaattggcattgagcaccttgattcctgctatcccttttatttaattgtattaaaaattttgtttcctcacctgtaatcccagcactttgggaggccaaggtgaccaaattgcttgagctcaggagttcgagaccagcctggccaacacggtgaaaccccatctctactaaaaatacaaaaattagcatggcatgatggtgcatgcctctagtcccagctacctgggggactcatgtgcgaggatcacttaaacctggaagttgagggctgtggtgagctgagctgaaatcatgccactttgctccagcctgggtgacagaatgagaccctatctccaaaaaaaaaaaaaagtttcctttaaatggagcaaaatgccattaaaacccaaagatatggcaaaatcctgcctctttttttttttttttttttttttttgagatggagtttcactcttattgaccaggctggagtgcaatggtgcgatctcggctcactacaacctccgcctcccgagttcaagcgattctcctgcctcagcctcccaagtagctgggattacaggcacccgccaccacgcccggctaatgttttgtatttttagtagagacagggtttcaccatgttggccaggctggttttgaactgctgacctcaggtgattcacccacctcagcctcccaaaatgctgggattacaggcatgagccaccatgcccagcctaaattctgcctcttgattaacctctgtgatttatgtatcctctcttctagctttggtgtcatccccagcactcctctggccatccatacaccactgatgccaaaccagagcattgatgtctccctgcctctcaataccttgggcccagtcatgaagatggaacctctgaataacctccaggtcagagatttacttcactcaggtggtacaagttaatatcttgacaattattattattattattatttttaaagacacagtcttactctgttgcccaggctggagtgtagtggtgcgatcttggctcactgcaacctctgcctcctgggttcaaatggtgctcctgcctcagcctcccaagtagctgggattacaggcacaagccaccacgcctggctaatttctgtatttttagtagagatggggtttcaccatgttggccaggctggtctcgaactcctgacctcgagtaatctgcccacatggacctcccaaagtgctggaattacaggcatgagccaccgcgcctcgcccaatttttcatttacatgtaaaaaagtccctctttcttccttaggtttgagttagtcatggaatcggatttgaaataaatctttgtggacgagagttttatgttttgttgttaagaaaaacaaaagtcatgcatgacatagatattcattcttttactcaacaaacacttagaaacttttttcttaacttcttatttgtaaaccttttttccttaagacttttatagcaaaatttgaatgtcattaatataagaagagatttatatggaggttatcattgaacattggaccacaggtagctaggctgtttggatttaaatgccccattagcacctatctatgataagtataacagcatcttagaagaattttatgtggtctacaagagcctctttatcttgaaaatgtcgaattttttagaatgcttgggtgtcagcttagagtttcattcagttttcacctacctcgaagtttcctttgaaatataaaccttctgggcttcaggcaacatgaaggcagagcagtaagctcataagtcagaactgtagcaaccctggaggttgctagcggttatggttttaatgttcacaagaacaggaagaaagccttgggccacccagaaatggggaactgtaatcgatccctgcataaagcagagaccctggaagggcagctccctcaaagaaaggagaactaggaaaatgttttcgccatctcccaaagatgataggaaatttctgagcagggttctgggtatagccccttgtgagaaattcaaggcccaatcaatgccatagatgagttatatattccaaatttacactacttatgtaggtgtagtaacctccaaatcaataaattaatataaaattggcccaggactggtgaaacctagagtcctgtcagaagcaaatacaaagcagccctttaacaacagttttaaatttagggccttcaagacccccagctgaaaagaaagtctctactgaaagtgagctcacaatttaacaggagagagagagaaagatacactgtgaaggatagtcaaaagacattgcaaagaggaggactggtactgtccccacccccactaagagcttaagatagaacagtctgaatgagactatgaaatatatttaaaatgatgaaagaaaaatgtcagctttcctctttccagtcaagacaggtgggatcccattgtttaatctagaaatacctgtgtgagatactagtattgatggtgagacgtcaatagtaaaatatcttggaggtaaaactaaacattcttcagtcatttaaataccagcacagcaggcctgtttgccagttcactaactaccttgttgccacagtagttgactgcctttttttcagcaaagggaataatgatttagagggtagacgagtgagtcacaatgtaacttggctcagacaagaagaataaagcaaggattactatgcagatggaattggctgttactatgatgacagtaatgtgttaaggggcttttccagcacaggatcctgaagaaacttaacccaaatctacatctgttcccttttcattgaaatctaacctcccattggccacagagcctcaagcctaatatttgaggacagtcagcatgcacgcaagaatgctttacctcataagtaggaaagagaatttgggtcacagaaaccagggcaaattttctgctcttaaaatgaaaagaaaaaaaagaaaagaaacagtaaacaaattaatgaatgtcagtttactttcctgttggcatttccatttgactaactcctgaacaggaaccctcacaagagaagttgaatcttagtccaaccctttcctcaaaagtattgatgtgatattagaactagcaagttttaattttcataaacctgatattataagaagcaaactttaaatttttccatctatagttaactactgatttttcaagtttcccacatggattctcttcttttggggatgtcataattgtggctattttctcattaattggcatttcccaatggatatgataaacaaaacttgaaaagagaaaaactttttccccctgtgagcagctctacttagtgtatgctggtgagagttggaactaatgtaatggctagcttagggatgtgtagggtactttagatttcagcttccattctgcccttttccccgtatgaacaagaagaaaatcaaaacatcattccaacaaggttaaactatatatacatccagataaagccaggtaaagattgatctagcttttaaatatatttgtataatgtttagattcaagagctcatgtgggaaaattagtatttttctagtactacagaccataaaattgggaaaaaaaaatgttggggattgaggaaatgaaattttgaattccatgtggattttagctattttggctaatttaatatcaatgtgtagaacaattaaatcaagcccagctgccagaactgtagtataaaacttattataaaaacttttcatcagaacactcattaaactacttattggcttatagactatttgaaacactatttaaaaatttaaaagataccattcattctttttttcttctttgagatggagtttcattcttgtcacccaggctcgagtgcaatggtgcaatcttggctcactgcaacctccgcctcccaggttcaagcgattctccagccttagcctctgagtagctgggattacaggcacctgccaccacacccagctaatttttgtatttttagtagagacggggtttcaccaatgttagccacgctggtttcgaactcctgacctcaggtgatccacctgcctctgcctcccaaagtgctgggattacaggcgtgagctgccatgccctgcctattcattcttaaaatgtaaaatacattatgccttaaatatgggaattaaatacctagtagagatttgaacctggaagaatttttctactatactgacatcgactgtaaaagcttttgtgaatcagcttataaacattatacaaagtaaagttaagcttgctcctactgggagcctttcttgagtttatttatatcacgtaattatattccttaaaaagagaattgattctctctgtttaaatacagcagaaaccttaataagtgtctaaatgtgtttcctctaaatgagttttctctgactcttgatgtccttgtttctcatttcgtgtgttagttgtgcttagaaacattttcccagtgaacttcttcaaacttggactgctttttcaagtcagtgtctgcaaggagacagtggaattatgatttaacgtgttcatctccagggtaatgctcatggtctttatgtagatgctgcagggttcccacagctgcttggcctcctttttccagggccataaactcttttgagaacattgatagcatcattctttcaagttttcaggatgataaaagcacagtttaaagagccaactaattctacaattatttaagaaaaactggccgggcatggtggctcacgcctgtaatcccagcactttgggaggctgaggtgggcggatcacgaggtcaggagatcgagaccatcctggctaacacggtgaaaccccgtctctactaaaaatgcaaaaaaaattagtcaggcatggtggcaggtgcctgtagtcccagctaattgggaggctgaggcaggagaatggcgtgagaatggcgtgaacccgggaggcggagcttgcagtgagctgagatcgcgccactgcactccagcctgggtgacagagcgagactccgtctcaaaaagaaaagaaaagaaaaacccagtcctgagacttttctccctaacaagacctccaatatctcctcccacaaagccaatttcgttcacctcttttgataattacctaaataacatgctcatattgggactcctggatttttatttatttattttttttgagatagggtctcactctgtcacccaggctgatggtgcagtcatgagacactgcagccttcacctcctgggctcaagcaatcctcccacctcagcctcccgaatagctgggaccacaggagcacaccactacacccagctaatttatattttttaaaattttttgtagagacggggtctctccatgttgcctaggctggtctcaaattcctgcggtcaagcaatcctcccaccttgacctcccaaagcactgggattacaggtgcgagccaccacacccagctggatttttctgttttagatattcctgtacatgtccccactcactgccatcatctacatacttttcatgttcccattttttctgacagaactatcttaaaatttacttaaatcagtgttcaatgtttacatcaatttttttttttaagagataaaatcttgctcagtcacccgggctgaagtgcagtagtataatcatggctcattgcagcctcaaactcctaggctcaagcgatcctgctaccttaggagaatctcaagtagctgggactacaggtgtgtgtcaccacgcctagctaattttttatttttatgtagagatggggtctcactgtgttgcccaggctggtctgaaattcctgggctcaagtgatcctcctgcctcagcttcctaaagtgctggaattacaggtatgagcctccacaccctgcccagtgtttacattattatgactgcatatattctttgaagctgagccatatattaaagtgatttttcctcaataaaactttttgtagataattggagttaatacccatttatgttggtgtttttaactgtaattcaatcccaaattccattgagatcagacccttcaaagtatactattggtttccctttcttaaagtctcttctagactgatttacttgaatgcctggaacatagctgtcttcctgggacctcctttcatcttaaccctggagattcattcccttcatcagctctctcctactcaggatctcctgttatagtgtccttttcttggtttactccctcttttgatgaaacacattttccagtggtttcctgagaataggtatgtagactattccataggtttgagcctttacatgtttttaaatgtctgttttagtctgtcttcatactaggttaggaatcattttcctcctaatcagaagccgttctgattcttgatacttgctttagccctgtttttttctcagtgaaagcttgtactttgtccccagtgttttaaatttcagtgatgtgcctcattgtgactctgtcttttcacccatcatgctgggtactcattgggttctttaaaaccggaaactcatgtccttcaattttaggaatttgtctttaacttctttgctgctgctctccccttcattttctctatttcttatcagacgtcttgctatttggatgttgattctcctggactgactctgttttcccctcctattttccatccctttttccttttgctctactttttaaaaccttgtttatgggaacaggcacagtggctcacacgtgtaactccagcactttgggaggccaaggagggcggatcacttaaggccaggagtccaagaccagcctggccaacttgacgaaaccctatctctactaaaaatacaaaaattagccaggcatggtggcacacgcctatagtcccagctaatcaggaagctgaagtaggagaattgcttgagccagggaggcagaggttgcagtgagttgagattacgccactgcactccagcctgcgtgacagaacgagccacaagcctttatctcaaaaagaaaagaaaaacacttttttatgaaacatttttaacattgcagaagtaaacagaatagtataacgagcccctgtgtacccatcatccagcttcaataattatccatggttaatatcatttatacccctttccataaccctactctattgtttgaaacaaatcccagacatttatatcacttaatctgtaagtattttagtatgtctcgtattttgtttgtttgagatggagtctcgctgtgccgcccaggctggagtgcagtggtgcaatctcagctcactgcaacctctgcctcccgggttcaagtgattctcttgcctcggcctcccgagtagctgggattacaggcacgtgccaccatacctagctaatttttgtatttttagtagagacggggtttcaccatgttggccaggctggtctcggattcctgaccttgggtgatccgcccttgtgggattacaggtatgagctaccacccccagctcagtatgtgtctttaaaataggtctcttttaaaaaatttaactacaataactattctcacaacttaaaaaattagcaagaattccttaatatcacatatcgaatcaatgttcagattttgtcataattttttttgttttattatttgtgtttgaatcagtaaagtgcacatattatggtgggttgatagctcttaagtctctttagctacactgtttaatatgatagccactagccacatgtggctatgtacattgaaattaaatcaaacaaattcagtttcatcattgcatcagccacatttcaagtacatgtgtggctaatggttactagatgggacagtgcagaagtaaaacatttacattactttagaaagttctgttggcagtgccaatctgtaggctcctcttccatatttcttttacctttggttttcagcagtttggctattatgcatgtagttgtttttcttgtatttctctggcttggagctcactgagcttggatctgcaagttgatagttttccccaattttggaaatgttttgtcattcttcagattttttttctgcctcattatgtctcttctctccttctagaactccagttacatatgtgttagactactggatatcatccctcagatcactgaggctgctttttttaaatttaatctttttttctctccgttcttcagactggataattcctattgatctgtcttcatgtacactgcttctttcttctataggcaacaaccttctgttaaactaatccagagcattttcatttcagatattgtactttttaattctaggatttccatttgattttttgctgaattttcctcactgggctggctcaattctttccaaagttatctttaagtctctgtctacgatagaaaggctttctgcaagccttgtggggagctaaattgggaaagagggctggagagtcttagcattcagtatgcattaattcatttaattcaccacccctcagccatgtctggcttttacttctaagtgccatctattttatcctctctaaaagaatcaatcttcagttttgtgcagggcctagagacctaagagctgtccagcagtatagaatcggggttggtatctagaaatcctattgacatcttaatcctctcgtttttaacactctcctcctctccccaccatacagttccagaggtgctaccagtcctaagcctttgagaattctgtggtggtattgctaatccatctgttttccaggtaccaagtttttgttgctgttatatctttttgttagtatctctatgaatttataccttgaaaattttttattttcccttagttatggcagaactttttccaggagaaaggaaacttaaatgtgatttttcagtctactgcctctgcctagaggtctgatagcaccttaacattttttctttccttcctgcgatacaactttataattaggaaccttagaggtgaacctgtggagaaagaattgaccctttcccatatatagtttttgttgtccctgtctttattgcctttaaatctcacataaacattgtcgaataagaggctgaatattaattagagaaaagaaatagacacaatgtctcttttttttttctttgaatatctttctaaaacaaggcaatattcatcagtctgttcatgtaacctttgattagggcagaaagtgctgaagacactagctgcaaaggacacgatcttacagtcctgtttattcatgtcttaagatcattgtcagccaaattttgctggtatatggctctgaggaaattctgtcccttgctactcctacatgtagttccagcctgtgagacagtcagttgcagatggtgcttgtccctgatatttcatgtcttgcatatgtccgttcacactcagaaagcccacagctatagctattgtaccagaaaaactggtagacgcttccaagcggaagaccttttcagcgctcccatcaaatgaagcaaaccagcttggcatttgctgacgtttcttgactgttgtgcaagccaaaccagtcagtgttgaagccttctttggtcttccaagatccacaattgaggactgcacactctgattgcatttgtgggaccacgatgctccttgaatagataatgagtccttgaagtggtggatctttcggaaactatatagcgattcccacgtcagacagttggatccagcgttggatctactatccaaatgatccctgtagacctaaaaatattccacctaaaatattccataagcagtatgtaggtactggagtcttcattatgaaagattaaaacattttgctgtcaaaaaataaaatagaaaattacttactgtgattgctacttccagtttgacatattcttcatgtcccatcaggactataaacatattatttaatctcatctgagaaattcaatatattatgtattagatattccttttttgctagattgtccttagtgagaacactcctttatctttttttatcaagataatcgagagtctactaagcagtatcttttgtctttctgtaaccagcactcaactactggtttctgggatcttttagcagtatatctattaataataactgtcttctttgaatggccacacataagcaatcggcaagagttccatattctgataagcaaaggtgtctgatggatcagaaatctgtcctcaaagtcaggagacagttaaacacccaaacttgggtcacattacccaagtaatagaaatctatgctgatatcctgagaaaggataatgaatttcacacagtagttctaaaatagtaataaaagtgatttgtgggcttttatttgttaaattcacaggcatctttttatcatgattataagctaggagttaatgatggataatggcattagttttatgtttctaatttaataaatgattagaaatagatttaaccttgtggtctttagatttagcttgtagtgcagtagaggactttgaattctggacgtaaaatagctacctctttctcgtcccagctgataaaaacctatattataggttgaaattacagagaactcactcagttttttcctcagctggattgaatttgagagccataccctgctctcattcatgtttactctcttatattttgctatagcatgatgtttaatgagatggggaagaaagtacattattcatactttttaatgaaggggttatgcataggctttgtagtattaaggcccatacatatttgaataaaactgcaggaaagctttgagccatgtgaccatgtacacataaggaatgtaaaatctcatagttggaagggatggtctttaattttgtctgtttcaaaccctatctgtttttgatggaattccctctttcttggcagtgatgggaaaatcagtgtgtacatgaataccaccagtgatttgctactctaaatgacccattctgtcttcataaaaccctgttacggagttgtttatttggcgtttttttatgtttgttttctttggcgcggggcggtggggggaggggcggtaaattggagtctcactctgttgttgcccaggctggagtacaatggtgtgatctcagctcactacaacctctgcctctcaggttcaagtgatcctcctccctcagcctcctaagtagctgggattgcaggtgcctgccaccacgctcagctaattttttggatttttagtagagatgaggttttttcaccatgttggccaggatggtctcaaactcttgacctcaagtaatccgcccacctcgacctcccagagtgctggaattacaggcgttagccaccacacctagttgtttatatgaaataaaatgtcttcctttaggttctatctgtagatcctagttctacattttgagatttttataaattaagtttctgaatcaaggcacccagggcctgaaagtcaatcaggtgggcctgtaatgaaaacatactccgtctgaatttattttcttttttttttctacttaaggaaagcctaagtttatggaaaggcatttatataatgtcagttttattgttctaattttagaagaaaatccatttagaaggagggaccctggtaaatgtagttggaatcagttatagtttggagactgaaggaaaatattatctaatcacttttgaaaagtgtgtgaatgaaagatgatccttgacttggtagcagtcttcctttccaggaacccctgaaggagttgaagggcaagtactcagaacaggaaagcacagaacttctcgattccatagctcccactgtgctcctgacagtaatatgtatatgtatatgaccttcttccccagtggaactacccagagacagcatctgtgttcagtggcctgcccatctgtccagtcatcttgacagtcacgtgtcctccttttgtccacgtaaggttgtactgtccaccaggcagaacataggcataacagtgaactcatttgatttttatcttgcagctaactaatctgaggatgtatgcttaatatctagaacctagatttgattctagatcagttttacccctggattgaaaaatcagttatgttcattgacaccaattactgcctattattactgaagtttgttcttttattgaatttctactaggtcttctatgacatattaaattagagtggaattttaatcactttaactgatagttttctagtcttgccttcacgattttttgattcaatacagtatgtattaaatgcttttgtttgttttttttcagtcagggtcttgctcaacttcccacgttggagttcaggggcacaaacatagctcactgcatcctcaacctcctggactcaagtgatcttcccaccttagcctcccaagtagctgggaatacaggtacatgccatcacacctagctgacttttttttttttttaattttttaattttttgtagagttgaggtctggctatgtttcccaggctggtcttgaagtcctgggctcaagccatccacctgccttggcctcccaaagtgctgggattacaggcatgagccaccgcacccagcctaaatgtatttttaaagtttaacagtaaacccaggctgagcgccatggctcacacctgtaatcccagaactttgggaggttgaggcagttggatcacttgaggtcaggagttcgagaccagcctggccaacatggcaaaactctgtctctgtctctacaaaaatacaaaaaagttagctgggcatggtggcacacgcctgtaattccagctactcaggaggctgagacagaagaatcgcttgaacccaggaggcggaggttgcagtgagccgagattgtgctgttgcactccagcctggggaacagagcaagacttcatctcaaaaacaaaaacaaaacaaaacaaaaacccagtaagccctacatagcaaataatagctcaagttgtgcctctgcccccctcttcccacccctcactattaacataaacaatattcgaagatgagacagcagcaaccaagggcacatcagccagtacatgtagctgtgtagctatcattaaagggaaaaagaaagactggtccctttcggcttatctgtcaggcaggctgaaaggcctgtgaaattattgctgactgtttctggcaactggaactatatagagtaattctattgtaggctgctagaagaggagaggattaggggccagtaagatttctgaagagtaactgggttgatcaatatagtatcacaggtgggttatacattggcagaaagcagtcacatatacatttgctgtaagttctggatttattttatttaacttataaaactttcaaaatgagggagctacccaggagtaggaacagatgcagtgtatcttagcatgattttcccttgatcctgggttccctgtgaggcacacagctgccagtgacataggtatgtcactggcatacctatgtcagtgactttcacatactggtgaaagttgcttaattcttgctataccactggcctgttccattcaagtaaccctcaggtaagttacctgttatactcagatatctaacttatagcaaatgtatatgtgactgctttctgccagtgtataacctccctgtgatactattctgaccaatcttttttattggcccctaatcctctccacttctagcagcctacaacagaattactctatatagtttcagttgccagaaacagccagcaataatttcacaggcctttcagcttgcctgagagataagccgaaaggcaccagtctttccttttccctttaatgatagctacacagctacatgtactggctgatatgcccttggttgccgttgtctcatctttgaatactatttatgttaatagtgggggtggggtggggctgaaggacaacttgagctatttgccaagtagggtttactgttaaactcaggtaaccatgagtataactggccagtgctatagcaagaattaagcaactttcatctgcccactcggaagagcttgcattaacagtttctaagcagaaaaggcaaaatcctaccaaaggtctccaagaccttgggtgatctagctatgcctttccctccctcctttcctcattaacttcatctgctactcctcctcttcactatagccattctggtctcctcacttatcttagaatagggtatgctgccacctcatgaccttttaattgactattgtccttgtctggaatgtgccttctcctagtctccatatcgtatagcttacttacttactttaggtttttactaaagtagtacccaaaaaaagagaatagaatgatagttaccaaaggatgggaggtgaggggaatgaagagaagtaggttaatggatacaaacatacagttaggtagaaggaataagttctttttttttttttttttttaagtctcactctgttgcccaggctggagtcaatggtgccatcttggctcactgcaaccttcgcctcccaggttcagcctcccgagtagctgattacgggtgcccgccaccacacccggctaatttttttatttttattggagacaggagtttcgtcatgttggccaggctggtctcgaacaactaacctcaagtgatctgcccacctcagctttccaaagtgctgggattacaggcctgagccaccgcacgcctggctaaatagtacctttttaataaaagattttctcacttcactcccagtactaccagtctcccttatttttaccccatagcatttcattatattttaattactacttaattatttattaccacctcctgctcctctcctactagaatgcaaattccaaaggaacagcagtttttgtctatgtttttcccaccactgctatgtctcccagggcctggaacgatgtctggcacacagtaggtgctagataaatatttgttgttgaatgagtctttttgctttcatttaggaaagtattaaccagcatcagattcatctagttcttgaaccaaactaagcaaggctatctcttcatcttaacaaacagagtatccctaaacacagcctctgcctgttgtttctcagcagccttgcgttctatcctctgactctgatacaatacccttttatctggataggtctggtcctggtcccaagtttaatctgaagactacaatcacaaattcattttctctcaagtaggcagagcaaatattagaagctgttgcttccttgatattaggaaaggcaagatcacagcacattaatggaccctgttttcaaaactggagatgactaggaacatagcacatgttaactgtgctcacattttgggaattttttctgttgctaacttacgtctgtatgtctctttaaaataaaaccaaattgccaccatgagactattaaattattatcctaaagagccttagactattttggttaatttaatatttctagagtaaatttggaagctcaaaatcagagtaaatgaggaagttcaaggatgctcttacaagtgttttggagcctcagggaaaaccgaaatcatttagatgcccgacaggaaatggtgctgagcaagccctttttactgtgaaaacagaagaaccctgtctttttcctaatcctgatagacacaaaagtgtaaggaggcaaactttaaaagcaagtgcctgctgggcacggtggctcacgcctgtaatcccagcactttgggaggctgaggcggcagatcacttgaggtcaggagttcaagaccagcctggccaacatggcgaaaccccatctctaccaaaaatacaaaaattagccgggtgtagtggcatgcgcctgtagtcccagctactcgggaggctgaggcaggaaaatcacaaactcaggaggcagaggctgcagtgagctgagatcccaccactgcactccagcctgggtgacagagcaagactccgtctcaaaagctagggcaaaaaagttgtcttttagcaatagatattcattatttctctttacttttaagaaaacaattttttcaggtattcaaaacagtcttttgcctttaaatggaaaaaaaagtttttaaaaaagggtagtcatctagcacttttcaatatcaggtttttctttacttgctattagaaagtttactttggtgggaaatcggtgtgataaggagtgaaaagactgagacacataaactgaaattcaactttggaaatgaatttttttcactcagtgagacttaaaaaatgaaccacccagctgcactggattttgtgttggaactttgagggtgtttttttttgttttgttttgttttttggagacagcattctcacactgtctcccaggcaggagtgcagtggcgtgatcacagcttactgcagccttgacctcccagactcaagcaattgtctcacctcaacctgaccagtagttgggactgtaggtgtgcaccaccatgcctggctaattttttatttttatttttgtaaagatgaaatctcaccatgttgcccaggctggtctgaaactcctgggctcaagcagtcttctgccttggcctcccaaattgctgggatcacagacaggtgtgagccatgcctggcctccacagtttagatggctgcagtgatggctatgggtgggctactttttctatcctccacaaaggtagtctttcatgaaaattgtgacctactcaccctttttccaaatggctttacaggggcagggtgggggattctcttttaaagaagtacttgagaatctatttcagttgcaaaatagttaacaaaatttgatttgagtagttctgaccttgctgtgctttggactcccatttgacagccctgaaggttcgtcattctaatttactcctgcccaaatggtgattttgacagtttaatccaaagtcttttaaagcaatgtctattcataccactttacaatctttatctaatctttagtgttctgaagatttaatttgctgacatttctaatttatggtctaaattatttgagagttttttgagattgagattaagcagatctcatagcagaatgggtactacaggagaagtcatagtatttcagtttcagtgtcttttggtttctgttggcttcctttcgaatcaaggctttactaagagagattggctcttaggagctcattgcctttttaaagcccaataattatatgtgctactagaggatttacaattttagagatcatctggagggctctgttcaaagctttcatttctggttctgagaactgtttaaatatggaaacttcaaacgctgaagtgcatattagggacatggaaccactgcctaatctgtcaaattttccctataaagggttccactgttcacatactcttaacgaacaatgtcctaatgtctcctgagaataaatcagtatggctttatactcaggatgaacagcagtttggtaccatttgaggcctcctcagctatcatgtaatacccctgatctattgggtggactgagaaagaatatgggaagagagttcttgtttgaatcctagccttggaagtgaactaaagacgctgtccagtttaaaatggaattagcactggaaggaaagtcaattgacatttcctgtggttcattactctttctgctatgtttttaactctatcagatactgtctaatatcataaatagacctttctgttttgtcagggtctctgagaattcccagataattcattggtcaatagagtttgaaatgctatttaaactttgggtcaccaagcacagtggctcatgcctgtgtaatcccagcactttgggaggtcaaggtgggaggatcgcttggggtccaggagtttgagactagcctgggcaacatagtaagactagtatgtctagtctattccagtatgtagactagtgtctacaaaaataacagagttagccaagcatggtggcacatgcgtgtagtttcagctactcacgaggctgagatgggaggatcacttgagcccaggaggtcaaggctgcagtgagctgtgattatgcctccacactccagcctgggtgacagagcaagaccctgtatcaaaaaagaaattaaaataaataaaataaacttaagatggtagataccttttggcgttgattagaaatgcagaactacatgttaatttaactccagcacctagcagaaacggccgcttctgcttgagtctcagatgatatatatcacatagttggagtaagtaccattaaaaacctgtcactccgagccattcccctaggatctgttgactaggttgtgtggtacttaaaacacatctgaatcatcattcctcagagaactggagatggttgacgtcactgcctggtcctagcttggaccagcctgcatataatcattccaaaagctaaaaggagaagagaaataaaagaaaaaaataattcttcagaaatgtggaaaggtcacaagtgacgttatggaagagcagatgatataatctcaaaggcgagccctgtactatttcacttggttttccttgtggcagtgcctcctttggttacctgtggtgagaggtcgggtaagaggcctcatttgccagagttcagactgagttcatgttatacctttttatagtacttttgagtatactggtacaaggttagaatattaatttagcctgttcatctccagctgtcccaccataaagagattgtagctcctgcagcaggctttctatactatggaaagaaactaattgctggttacaggcttaagctgacaggttgttctttccttagcagcctcttaaagtaactttaaacaatcattgttattattaagcatttatagcctgcttttgtgttttcaaagtgccttataatttctgtttgctttcctattgatgtccctaaaaagcaagttaatattgttatggtcacatgttgcacatgacataccaaagaaacagagggttaggtaatcttcttggtaccatctgtgatctgctttgggcattctcaaagcagaagctgaggtgtgcattctcttccttcactcattgaacccattttctcactgcttgctttagtgtgtgtgtattgtggcttttatacttttttgactgcaacttacagtaagaaatgtattttacatagtgtatacacacacaatatgtaaaactgaacagtttcaggaaatattacttactcttcatgagatgcactgtgatatttttcattttatttttttaatgccagtttgaacccacttagttaattttaagaactaccggttggtcatgacccaccaagctagggatacttgaagctaaaggatacacaatagcacattttcctagagcatcagttttattgaaaggtaaagagagaaacacatattaaaacatatatgggtacattatgggatttagcatggaacttcaaagatattttgttcttatgatagtctacttcatattatacccctaatcttgacccagccccatgcctccttcacagtatgtgtccattctttcctcttctattacgggaaatacactagaaaaatgtgagaagtactgtgcttttgggacttgtttgttcgtttgtgagacaggatctcactctgttgcccaggctggagtacagtggtgcagtcatagttcactgtaaccttgaactcctggacccctatcctcctatcctcttatcctcgtgcttcagcctcctgagtaactgggaccaaaggctcatgccactgcagtcagctttttttgttttgttttgatagagacaaggtctcacttaggttgcccaagcttgtctcgaactcctggccttaagtgatcctccttccgcctttggtctcccatagtgctgggattacaggagtgagccactgtaccaagccccatagaacttttaagttcattattgtgtaaacccaagtgaggtcagaaactttgtatagtttattttacaactgttattcttactcagcacctattctgtgccagtcactattctagaaactgagaatattgtgacaaatagaagacaggaattctttccctcatggaatttatattctaccacaagtggggtatgtggcatggggacaggcaataaaccggcaaatcagtacaatacatagtatatcagatggtagggaggacagtggaaaaatataaaagaagtattgggacagtggaaaaatataaactggagttggaggttgggtggtacagttttacaaaaatatgttggtcatggaagacctatctgaaaagataatatttggttaaagcaaagactcaaaggagacagggaaagaatcatggatttctggaggaagagcattgtagacagaagaaacagcaaatgcaaaaagccatgaagtaggagtgtacctgctatgtgcaaggaaggaacaacaggctcctgcagctggattagagctagcaaggaggagagtattagcacgacctcagagaggttggaggagttggattataggcaattgcaacttggtttttattctgagtgagatggaaaggtttgagcagagaaatatttatgagctgacctacattttaagatcactctggctgctatgttgagcatatactggggaagctaggtgctgtgaagggaatgtatagggggatgtggctggaagactagtggagaggcagagagactgttaaaggctttgcagaatcccatagtagttaccgagtttggaaagacagcaggaggttgtatttggaggtggggaggggagattaagagtttggttttaccacaatgagatactatctcacaccagttggaatggctattattaaaaaaatttttgaaaataacagatgctggtgaggttgtagagaaaaacacaacacttatacactattgaagagcatgtaaattaattcaacccttgtggaagacagtggtgattcctcaaagacctaaaaatgggccgggcgcggtggctcacgcctgtaatcccagcactttgggaggccgaggcaggtggatcatgaggtcaggagatcgagaccatcctggccaacacggtgaaaccccatctctactaaaaatacaaaaaattagccgggcgtggtggccagcgcctgtagtcccagctaggctgaggcaggagaatggcgtgaacctgggaggcggagcttgcagtgagccgagattgcgccactgcactccagcctgggtgacagagccagactccatctcaaaaaaaaaaaaaaaaaagacctaaaaatggaaataccactcgactcagcaatcccattactggatatatacccaaaagaatacaagtcattctatcataaagacacatgcacacctatgttcattgcagcactattcacaatagcaaagacatggcatcaacctaaatgcccatcagtgatagactggataaataaaatgtggtacatgtataccgtggaatactatgcacccataaaaaagaatgagatcatgtcctttgcaggagcatagatggagctggaggctattatccttagcaaactaacacaggaacataaaaccaaataccacatgttctgacttgtaagtgggagctaaacgatgagaacacatggacacaaagaggggaatagcacacactggggtctgctagagggtggagggtgggagaagggagaggatcaggaaaaataactaatgggtactaggcttaatagctgggtgataaaataagctgtacagcaaatctgatgacacaagtttacctatgtaacaagcctgcacatgtacccctgaacttgaaataaaagttcagttttagacatattctttttgagcaacctattatccaagtgaagatattaagtaggcagttggttatatatgtgatcattgatttccctcaagcaatctaggcatgatgttatagcttttggaaaatagtttagaacttgtctggattatatcttcctactatctctacctgttgggatagtgaatttttaaataagaaaacaagaaactgtctttctcttttcctgtctccctccaacaacaatatcatgctctttaaagctgatttagttatatttaagagcaatcagcatcaggattggaattaaactggcttcatactgtgtttttcccttggttcttttttaacacccaaaatatgattggcatatccttggaggacctagcattctttgggttgtgatccactacctgtgttgtcctttcttagcatgtagatattatttaactcagtgatttgaaaccaaaagaacccatacatcatcccatccccccattcctgcctcattgagaatcagtgtgcctaatcagagatgttgctgatgggattctgttatgtatatgaatgatatggaggtagaaaaaatgttgagaaacacagtgtttcatttttatttgttcaacatcttccacttattttcatgcaacaaatattttttgaggtagtcaatatgctagcgaagatgagagacagaccctccactcaaggagctcattgtattataggtgagccggaagtaagccattattatatgctatcatagaattgtatgcgttgggtgctgtggggaggtgttagagctttctgggaagtgttaatcttgaactgaaccttaaggttaaataggtattttccagacagtgctaagcttaaggagaagaaaatattaagcagaaagaacaacatataggctgggtgcggtggctcacgcctgtaattccagccctttgggaggctgaggtgggcagatcacgaggtcaggaattcgagaccagcctgaccaacatggtgaaaccccgtctctactaaaaatacaaaaattaggtggacgtggtggcacacgcctgtaatcccagctactcaggaggctgaggcaggagaatcgcttgaacccggggggcggaggttgcagtgagccgagatcgcgccattgcactccagcttgggtgacagagccagactctgtctcaaaaaaagaaaaaagaaagaacaacatataaaaaaggtacaaagctgtgactttcagtgtttggggaataagaagtaattttgatgtggttgaagttaaggaaataggctggagaggtagtctggagtcagatctggggaagcctatgttactgaaatgaacccagttctagcctagagtgaaaatatgagagctgcaaaatacagattttgaaaagctaatgtaaaagagatgaactgcttcccccaatgaatgacctgtgtagttgatcctataaagagatgacaatttaccaaggcagtagcaaaaggaatcattaagctaacaatctgccgataagccttttaaaaagtctcttctaatctcttttttaacataatagtagtactacatctgagcatatgtaagatttcagataagtctaatgtggttatccttaattaggatgctgagtaaaaaaggtaaaacaggagatggtgaaagcagagtgaaattttttttttttatttgagatggagccttgctctgttgcccaggctggagtgcagtggtgcaatctcagctcactgcagcctctgcctcctgggttcaactgattctcccacttcagcctcctgagtagctgggactacaggtgcatgccaccacgcccagctaatttttgcatttttagtagagatggaattttgccttgttggccaggctggtctcaaactcctcacctcaggtaatccgcctgcctcagcttcccaaggctcacatggtggctcacgcctgctgggattacaggcgtgagccactgtgcccagccgaatttttcttttttgaacagacactttctacagtacttatgagtcaaggctgttcactgtgctgtgcaaatattaactcattatcctcataacaaccccatgaatttagtactttgtgatctacattttacagacaggaaactgtcagagtcagaatttgaaatcaggtgttctggctcccaagtccatgctgtgaacctctgtatctgccgcttctgatgtgtgggtatcctagctcctcagaaaattgttctacagtagaagtcccaggaaagccctcagggtgtcccaaaactcctgaaattctatggcaaaatgttgtgtgtacatttttcagcaagagagtcagtggctttcctctgtttgtccaaagggtctacagtgcagaacagtttagcaccacttacctagaggacctttttgtgtcctttccattgttaaaaggctcctgttggcataaggattcttttggaagaacaagatgtttacaaacccattcagacttcttagataacaatgttctaaattaattgcttatccggttgatcttcctgggaactttttcccaaatatttatgccaggtcccagattcagagattgtaattatttcatgtagggtagggcctggcatctgttttgaaaagcctttccagatgattctgatacaggtcttcagttaagaaccactaatattatcctctagagaatggggatactactttatagtcaaagataatcacttgcatttcacatgagacctttacatgacccaccattagcctacccccatcaccccagttttcacttttttttttttgaggcagttcactcttgtcacccaggccagagtgcaatggcacaatctcggctcactgcaacctctgcctcccgggttcaagtgattctcctgcctcagcctcccaagtagctgggattacaggtgcccgccaccacacccaactaatatatatatatttttttgtatttttagtagagatggggtttcaccatctggccaggctggtctcgaactcctgacctcaggtgatctgcctgcctcagcttcccaaagtgctgggcttacaggcatgagccaccacacccggccccagttttcacttctaaatgttctttacagagcctagcgctgtctcaagatcttcttggtgcccttatttgaaataagaattctcctcccttacctgccaagtaccagatgagttagaaaatactctttcccggaagcccacggctggcatcaatctttgaaagtagtgctctggtacatcccttgttgttgttgttgttgttgttttgttttttgttgttgagacggagtcttgctctgtcaccaggctggagtgcagtgacacgatttcggctcactgcagccttgcctcccaggttcaagcgattcttctgcctcagcctcctgagtagctgggactccaggcatgtgccaccacacctggctaattttttgtattttagtagagacagggtttcaccatgttggccaggatggtctcggtctcctgacctcgtgatctgcctgccttggcctcccaaagtgctgggattacaggcgtgagccaccgtgcccggcttcccccctttttttttttttttgacagagtcttgctttgtcacccaggctggagtgcggtggcgctatctcagctcactgcagcctccacctcccaagttcaagctattctcccacctcagcctcctgagtagctgggactacagccacgcgcctccacgcccagctaatttttgtatttttggtagagacggggtttcttcacgttggctaggctgatcttgaactcctgacctcaagtggtctgcctgcctcatcctcccaaagtgctgggattacaggcgtgagccactgcacccacccatgctctagtacatcctaaagaatgcctttagttcctctttcctgacattactctgcttaaattccccagattcaagctttttgagaatcctatctcagcattttgggcatcaggccatgttatatataggtcacaaactcctagccttgttagttgacaggttaaaagcaaggagaataattggatggacacttctgggagagagaacgcaaatattatggagaagggaatacaggcaccatttaaagtaaggaaggtaagttgatactaaatgtagaaggactggaagtactttagaaagaggatatttggatctcatagccacagttttaagaggtcagtatgctgttgaagtgtagacatttgccataaaagacagagagtgagaatagtgtactagataagcactttttaactctgtttttagagcaaaatgagaaagaaacaggtatagttactgatcatagaacttgctcagataaatgttttcctacagcgctaagagcatagataggaaagtcattagtgacagaaaccagtgggaggtggtgacttagagcaagtctcctcctactccctcttcttacagtataagggccttatgatgtgctgctgtgcaatctgcctgttcctgaatgtatataccaatcagtgttgccctgaataaaagtacttactgtagctttaaaaaaaaaaaacaaacaaacaggatgctctgaattaagcaggctatggtagaatcatagtcgagaagtttgtattgtgagaagaaaatttatttatttgctcgcttaaaggttttttgttcttatagtcatcaggtttaccagtgttgggccaaacaagctttttccaaccataagacctgggaaataaggttttataaaagaaacaactttaaaactgatatttaaaaaaataaaaaataagagatagtatggcactagttattgtggggagaaataaaaatcaaggtttagcgtcaagtttctgtttgaatcgtaattcttctgtgtactagctacatgactctggatgttacttagtctttctaaacctgagtttcattatctgcgaaatgagaggggaatgatatctactttgtttgagatcattatagtgtgagttagaaataatatcattaataggtaacttagtaagtggtagcagctactattaataatcatagagaaaaaaatcacagactagattattcctggtatacaagttgtgccttgaagacaggccttctggaaggaggtagagttgcaggttgtcacagttctatgacaatggagtaagtaagggtgtgctttgcagtatatgggccagtttgtttgatttggggagacctgcactgagagaaagaggaaggaaatagggaggcctatttctagacacagcgctgttcttttcctcctacctggctccctgcgatgtcctcatttgaccttgttgctttcctggcaggtggctgtgaaaaacaatatcgatgtcttctacttcagctgcctcatcccactcaatgtgctttttgtagaagatggcaaaatgggtaagtaccttcctgcctgtcctgctgaatatacctttgcccttcctgtgcatgtcaggcagagcatagccccagaagttttgagttattttgaggttaaaaaaaaatgggttaaggatattctaaagctcttaataattgctcattatttattctcctgtgtcacaattgttcttgctctgccattggtctctaaatcacagtgcccaatatctgaataatccagtcaccccaggatacagaataagaggtttggggaccaggtaaatatggatttgaatctcagctctgctatttatttgctgtgtgactggtcaaggtgataaactttttggaacttccgcttccaaatttgcagtgtaaataatttttataattatttcatgagataatacatgtaaatttagcactttactctgtactaagttcatactgcctcaagctaagaattcagtaatttgtaataaaccgtcagaactcccgatgtgcctattgacatttctctcttcccttatttatgaatcacaatctaataaaactggcttatattggtgcatattaaactatgttggcacttaattgatttgattcttacaatagctcttggagtaggcaggacagatgtaattatagataaagaaattaaggctcagaaaggtcataagtcaccaaaataggaaaacaagggagccaaaatgaaaccctagatatagactcttttccaattatcctagtgttactgatgacggattaattgatctgaagtatagcacttttgtagagctcagcattggctccattcccagcctgctgctagctgtattgcaagagccagcatgccaaaggaaaaatgatgcaaggcatcgaaaatcagaatactgacagcttatgcacatccatccttcccctctgctttcccatacagagcgccaggtcttccttgcaacatggaaggatattcccaatgaaaatgaacttcagtttcagattaaggaatgtcatttaaatgctggtgagtaatatactctaaatttcagtttcatcttagtaaatcaaattagatatttgaaattttaatctttcttttgcctacccttttatcctcccccgtatctactatgtttctagtgggtatatatggtagatgcattactttgcaaacctctgtttaaaaacgtgatatgttttgatgtaggtactagattacttacaagctaacatttaagaaacaagctagaatcgacccatctacccatttcttcactaaagatgtgttagttctgttacttaaacatcctaataatcaaaaactgaagtggcacttgagaacatgcactcccttagtaattgaaaggaccattttcttcttttatatcaatttttggtgttggaggaaggttaactttctttcttagattctgtacttagaaccctgtgtttataatgaaataatgtatcatcattagtgaaagcctcgttgggccaagtatggtggctcataccagtaatcccagcactttggaaggccaagatggcaggatctcttgagtccagttcaagaccagcctggacaacatagtgagaccccatctctataaaagaaaaaaaagcctagttggtaaccttttactacactgccctgtgccacctttcatatgatgatactaacctctttaatcaccattaaagagctccgtactctttcatagttaactttgttactgtaaaagaacatgaaaggggtatcccaagaagagaaacaatagcagctattagtcccttgggctgtgtttctctgaaggatttctcaggaatgaaaggagccctaagttatttagagtcctgcctttgtttcactgttgctctctctttctctttagagctctttctttctctccttttgaagttagtactaggctttgtgagtttgaatgaaagtgagccttggtgcttggtcggtacctcctctttcctcatttacccctcatttactcctgcatacattggtggttctcataagggatttccagcacattgccatcctcccattgcagctggagcatagcactggggaaaggaggcaacacggcagcacagaaagcaaaaaaaaaaaaaaacacacacacacacaaaataatgccttctcattccagcttcccccaccccactccccggcccaagatggagtctcgctccattgcccaggctggagtgcagtggcacaatctcggctcactgcaagctccgcctcccgggttcatgccattctcctgcctcagcctccagagtagctgggactacaggcgccagccaccacacccggctaatttttttgtatttttttaatagagacggggtttcaccctgttagccaggatgttcttgatctcctgaccttgtgatccgcccgcctcggcctcccaaagtgctgggattacaggcatgagccactgcacccagcccagctttttaattttagttttttatggctctatgtaatattcatcttctgtgttcagatgaatcttatagggcttttgaaatccaacatcatagtgatcagctttatcctgtgatacctcttttaaatgtgatgctcctataggccctctctgagacattcaggagactgaagccctcctggaaccctcagaataaaagacattcagacaggcatctttgcatatagaaacttcaggcagatgtttgcctctgataattgtttcacgtctctggagctcttggagaggtgtttgaagcatggtcttctgtaatttccatcataataattaattgtttcaattaattcagtaataattgatttttttcattttgtgtcatatttgaagaagatgacagtgtcatctttccctcactttgaggctcactggtggatcctattagaggagccacctctgtacccagctaggaagagaccaggcccctggttatattcacctttgtgggagttggttcaatggcaacatttcaaatagaatgttcctcagaacacttttcccttatgaaaaagggttttgggccgggcacagtggctcatgcctgtaatcccagcactttgggaggccgaggtgggcagatcacgaggtcaggagatcgagaccatcctggctaacatggtgaaaccctgtctctactaaaaatacaaaaaattagccaggcgtggtggcgggcacctgtggtctcagctactcgggaggctgaggcaggagaatcagcttggatccaggaggcggagcttgcagtgagccaagatcgcaccactgcactccagcctgggtgacagagcgagactccgtctcaaaaaaaaaataaaaataaaaataaaacaaagaaaaaaagcgttttgttatccatgaaagttgaaaaatacagcatatgctaggcttcacctggaaattgccattgcacgttagcagactaaaagttctgagaagtgctatactgaagaaacctatttaactcagtgttaactgaacttatttggccttggaatttaaaatcacaaaatacttattagtaacatcatgtggaccaccagtattccttgaacatgatctggaaaacactctccgagagagaacagagatagaccagagtgattggaaagcaggttttgtttcagacatgttcagtatgaaagggacatggttgttcaaaaaagaaaatagaagttggggtgactgaggactttggtctgtcaaaataacagagaagaaaaaatcctcctgcttttagactggagttttgaactcttattgcacctcggcatgtttttgtgatcttatcaaagaggaagtgtctggcatttctcctagtggggctgtgccctttgatgtcgtttctcagagcaaattcagttttgatcaattctgtcatggcctcacgccaatcgctccatgctgtaggtgctccaaataccaatgaatcagattccagtgatacactgctctgtggccatgccgcacatgaaacataggggaaaacagtcattgcattttctccaggagtccaaggccaacattttcccacattaaatcactgctagtcttgcaagaccacttcctgcaactaatcctttccagctcttcctttgagtccacccccaggtctggagtgccctggcctttagatttccttccagtctcgagggctctattaacatgaacgtttttggctttagtgccttctgattcaacaccctgggtctagctgagagctaaaaataccatcctttccagctgatctgccctaatcacaatagcaccaacactttaaatagcttttctgtgctagcatagacatttgacagatggaactaacactctgagggctacaggaagtcacaggcttaaaggacttaaccaacttagcactgagctttactttgctctttcatgtctttctagagaataaagaaagagaccctcttcccaagtcttaataattaatcagatcttaagagaaaagtgtatggtgggagtgcttatgatgccgctaattgtgttaagtactagaaaatgttagatcagaaagctgctaacagaagtctctcctttctagcaccgatcatttctgtggatgttgggagatctgtatgaatctgttttacatcttaccattacagctgcatttggggttaataggtatctgggactactgtcttaagtgcacaagaagtagttgcatctccagccatatctggaaaggaatctttgtgacgaacagttctacaaaccagttttttaaattaagtgtttataatattaagaaaagctcagagacttaatgtatctattttcattagttaggtactgtaatgagagacaaatatttgttccagcatgggggctaggtaagggtgaattctgtttcattgttttgttgcggctctccccatcctttggaatatttcaaaaatggaaacactcttccagctagcacctaactatcatttggttgcttaaatggtaaaaagcattcttttcagcagtcatagtggttttgaacttgctaataaataccacagcagggccccagatgtaaattcccccattcccactctctaatatgagtacctgcttcacccttgttgctgtcagaggatgtgtgaccttagctaaagtagaaagataaaagaaggaagatcacatcgacaccttctaagagttgaggccccagattcaaaatgccaaatttatggaaggatacaaatgaaccataagaaatcttatattggctgggctcagtggctcacacctgtaatcccacactttgggagcctgaggcaggaggataatgtgagcctgggaggtcgagactgcagtgagccatgatcacgccactgcactccagtctgggcaacaaagaaagactctgtcgagagagagagagaaagcaaggaaggaaaaagaaaagaaatcatatcttgaacgaagggtaactatatttgaccatctttttttattctatgctttgggataaatctcagtgtcttatgcctcagatgatatcatcagcacacagtgaaacaatattacattacattctcattatcaaactctcacaactataagattccgtcctgtttcccagaaggtcaaaatgtgttttaaaaaattaaaaactatgatatcttgtcaagaattctatcccagtcagaccaggaagcctccttatatctggcttcccttgccattcatcatacatttagcagaatctcatcattctgcaatccgtaaatcttcaaactcaaacctaataactaaaatgtataaaaatcgaatcacacatactaatgttatggaaccctctctctagtcttctgataaaaatcacagtacagtcattcattaggaacagagtcaggttgctggccagaatgcttccaaatgtattaaagttacatccattcaacttgcttattcttcctggctgtttggcatgttttctaattctagaagagtgagaataagagagagagagacagagagagtttcttagcctgtcatctcttacataggtggtgaaataattgagaatatttcatgattatttctgtaggaatctggcccttgccacatgtatatgctagaatgtatttgtgcctatgcaacaaggtgggtgttcaacaaaggctcctactttgtgtgtttttgggtttcctgggaaatgggcaagggcctagaaagttaggaatgatttttacaacttaaagcaagcccctctgtgttcaagacaatcctgtcaaaaggcattagccaaaccctagctgatgatgttgcctagcaacccactcaaagctgcaagagcccttcattgtgggaagcagggtggcaaccagaactgcctcatcccccacaaggtgattaaaagggcatattgaggccccttcttccagcaatattgcatagatgtaccctgagatacattttttgactcctcaaatagagccatttcttaactactctgcttggtgtcagtgaagacattggaaataaaaggggaaaagctaagtaataactaagtgtggtaaaaatgtctcatgaaaggagtcttagtgcctcctctcctgagctgtcagtggtttgaatgtgcgagaaagacatcagggtgagagctacctgcaaaactagttcacgtctatgtctatggtattatgtaaatattggcatctccaacacctatcagagcagatattgatgaaaggtacctgttgtattgcagataacgtgggaaacacagtgatgaaaaactccaggatccctttgttcagagagcttaccatttagaagggtagaaagaccatccatcatggcaaccttttcccagagagcacaatagaatatgacagatttttatgtggggagaatttagttcttgaagtaggcatgagtaatttgaatgctgtcttcagaaatgaatataataaacagtcaacaaagaagcagtgcttgtcatctctattcttaaagtttctctttctctgatacagcaacatctcataaagagagaaataacctttaattctggaacgttatgtcctttttgaaactgtagtcatgaggaagagccaaaacaccaacccattcttaccctgagttggtgactatgaaaacttctgtcatagtttctgtcatagctgggatcttaggatctagcagcagtcacctttgcacagcttcagtctttctcaaaatctgtggttgagacagtttgtttcgttattattttcgaggcatagtattccctaaaggcttaagaaatcatttctgcctgctttgaaaaaaaaaaaatcttaaacatctaggttaataaatttgatttgcagttgacttctgtagctctgggcccttcctgatcctggcagttgaggcccgaatggctcacaatgaagtagtagtgacttgggaagtagcactatggatgtggtcatcagtctgtgtgtccccattgatctggaaccagcatccagaaacagataccaacatgacagtcactatggcatacccacacacttatttctgtctttgtcctcttcagagtcttctttacctgtctagcacctaatttgagattgccagctccttaggcccaccaatatcataatctccaaaggtaactcgcactaaaccataggtgtaccttattctgttttcagtcctggaatgtgataggcagacaagtcatgaacctgttcttcactttttgctattgtgtgggagaatggcttctgaagtgtacacatgtccatgtgacagtacttgtcagggaactgaacacacatggctcataaggatgtgagaagagagtgtacatttgtttgagattttaactgaaggtgttggattttgaatctgtatttctagacactgtttccagcaagttgcaaaacaacaatgtttatactattgccaagaggaatgtggaagggcaggacatgctgtaccaatccctgaagctcactaatggcatttggattttggccgaactacgtatccagccaggaaaccccaattacacggtaaggcctttctcagaatgggtgagatggattagaggagggaggtgagagccctttcatgtttacttagcaccctagaaagacctggaggaggtgctttaaacctgagatatacaaaataagtagtcaatgaagaagcttccatttgcctcaatggaagacctcctctctgcagtgtctgccccatccaacaggaatggtatctctggcaagtgcctcaaatccatccctcccccctggtgtatacagagttgctcacaaaacttggcagcttcatcctcaatatcagttaatacatatctagtgtatctgtgcatgtggtactataataagctgccgagaggattgtttacatagttaatgtccagaagacctttcttgctgttggagttcatgacctaaggctatcagagtcattaacacatgagcttttttcagcagcattgtatgacctgaaatgcttgttattaaaggtgaggcaaaatggaacacacctttggaagcgtataaggggactttagtttgggaaatttccttcagtatcacactgaactaaagtaaaacttctggcaataataaggcagaagcagttgctttgttaaacagcagattgatagccaagcactaggcatttgtttgctgttgtaaaatgcaatttcccaataggatgtcatctgcattttgaaaagtaaaggaaaaacccttgggatgggagaaatatcttattcctctgttatgtttgagggttttatggggatctatttatttctgaggaagctgaatagtcagtagcttaagggagccttttagtcatttagctgagaaaactctgtgacccgttccttaattttgacagctaagtctgttttcactagcatatatcaagggaatagtaccatccagaactgaaaattcttggtgtttttcccactagttcccatccttgtagtaagttggagtagctgtgtgtgtgtgtgtgtgtgtgtgtgtgtgtgtgtgtgtgtgtgtgctcgctcctgaggcctatcaagttagacttttgcccaagcacttatgagctgaaaaacttcaggcttccctcataaaatgtatgctcctctccccaaccccccaccagtctcatctcttttggagagtaacatacactgtcatttatcttgagtttcccaagaaaggaaaacccctctgtgctgtttctggagggacaagttttactataaaaccaagatagcacatgcctgtaatcccagctactggagaggctgaggcaggaggatcacttgagcccatgagttcaagaccagcctgggtaacatagtgagaccttgtctcaattggaagaaaaaaagggttggggggagaataactccatttactctctagaaatttgccaaaagtttatatatgggtgtgtgtggttttttttttttcctttttttctttttgcttactgtccattattttattgtatatagtcttccatctcagctaggttaaaggagcatgattactcccaggttgcagataagtaaaccatggctaagaatgattagtgactagttcaagatcatgtaatttgttggtaggtgaattttgtttagaattcaggtgtttcttgacactcttcttacacaatattcttgattttgagaagagcttcttagtatcactgtcctaaacatagtttgttaaaattttaaaaagtattttattttgaaataaagacttaacaaattttttaaatggaacagtagagtttctacatctcttttacccagttttccccattaataataacatcttacacacccatactacattttcaaaactaagaaataggtattagtacaatataataaactaaactatagacattattctaatttcaccagtttttacattacttttgggggtgggggattggtagtggatagtactatgaactcttattacatgtatcaatttgataactgctgccagagtccagacacagacttgttctgtcaccacaaaaaaaaaaaacttcctcttgctgtccctttatggtcagactctcaccccagccctaaccccggcagcctttctccattactataattgtgtcatttttagaatgttgtataaattacacatgtaacatgtaacctcttaagattgttttttgcacacataatactcataacattcttccaagttgttacatgtatccatagcttgttcttttttatggccaagtaatagttcactgtgtccatgtaccacagtttctccattcatcctttgaagaatattttctcctttatatttaaacaaaagtttggaagtaattgtaaattcatatgtagttgtgagaaattatacagtgacctggtgtggtggctcatgcctgtaatgccaacactttggaaggctgtaatgggaggatcgcttgaggacaggagttcaagaccagcctggtcaacatagtgggaccccatctttattaaaacatattttttttaaagaaatacagtgagctcttcctgtaagtgacctgagatgatctctgctcagttggcctagaaaacccccaaaatcatacaaagcaagagattcaaatcttcatgtttactttaagaacacccgtggaagtgcccaggccatcaaaggtatgcatatccaaatagccaccaagtacttgaaagatgtcactttatagaagcaatgtgtgtcattccatattattatagtggagttggtatgtgtacctaagccaaacagacgggctgggcacaggatgacaggtggcccaaaaagagtgctaaatttgtgctgtacatgcttaaaaaggcaaagagtaatgccgaccctaagggtttagatgcagattctctggtcattgagcatgtccaggtgaacaaagccccaggatatgttgctgtatttatagagctcaggtcacattaacccatacataaactcccctgccacatattgaaatgatccttactgaaaaagagtaaattgttcctaaaccagaagagagggttgcagggaagaaaaagatatcccagaagaaattgaagaaaacaaaaatttataacctgggaataaattcagcatggaataaatgcaaataaaagttaaaaaaaatagattctgtcctcgtggtttagccacatccaccttcctttgtcccatatatttttattttatttatatatatatatatatatatatatatatttttttttttttttttttttttttttaatatagagatagggtctcgctatgttgtgcaggctatctcaaactcctggccttgagcgatcctcccatctcggcctcccaaagtggtgggattgcaggcgtgagccactgcacctggcccacccgccccctgccccatatttttaaatggtgaatttgtttatacttccttgccctctttcctattcttcatcctgtctggtgactaggttctctgcccacaataccatctaaatctcccatcatagcacttgacaaataggtctaatttgttcccctaagtggcacccttttagtcattagactaaaagaagaggtggtggtagaggggtatcagaggtatctgatttgcctatctaaagaggcagactctaaagtcattctgatccattcccttcatcaccttaagttcctattatactattaatctgatctgagctaagtattaagaaagaaatcgggttgagccagcactaatgcatgacagactgatggtcccttagtctcctaagaggggttaataaaacacttctccccaaaccccagtttttattgtattttattaagaagataggtttatcctataagggtgaggctatatctctgtaagtaggtaatcctcacctgaaagataacttgtcccacgtgaagcagtgtatgttccacaccatatgccaaaagtggatgcatagccccttaattttaattaggcaggacagggtgactcttctgcccttggtgtgtctagtttggactggattcctgaatggctgatgttaaagacatgtcacataaggaattagcagttggaaagttaagccccaaggaaggcctctttctccctaggagccatacaaaatgagagccagagtcctagctatatgtaataaacttgacactttgtcagaggctggggtggaggtaggggtggggaggtgtggatattaagagtccagacacagggaaagtttcttccccatcctccaaagaccagcggtaatgcccagggcctagggtctggtcagtccatgacttcccaccaatgccagccttggcagtttgagccattgttgaggaaggcaacatttccttactagttgtaaacataaaaatgaacctccagctggaggaacttcaagtattgttacaaagatgtggaaaaatacaagatagtattttgggggagtatttggggactacctctccttagtctgggagttaactctcttaagctgttgtttctctttttagattcctcttctcttccatttctgaatccacatattctcccactagaattttccacaacactggcagtagagaaggctgtagagaaggaggtacaagaattgctttaggtccagcgcagtggctcatgcctgtaatcccagcattttgggaggccgaggtgggtggatcacctgaggtcaagagttcgagaccagcctggccaacatggcaaaaccccttctctactaaaaagacaaaaaaaaatagctgggtatggtggcacgcatctgtaatcctagctactcgcgaggctcaggcaggagaattgcttgaacctgggaggtggaggttgcagtgtactgagatcacgccactgcactccagcctgggtgacagagcaagactctgtctcaaaaaaagaattgcttcaatagggagtttgaaagtcagggaaatgcctaaagatgcaacttggaccaaaatagggagctgttttctatatataaggaatagctatattcttaagttagttgttttggttttttttacatttatcagaattgtcttcctgactaataccaagcagcagttttgggaatgccttggggactgaatattaaagctgtaaatcaatagaatatcttcccatgttcttttgtttggtttggggtttttttgcattttaaattttactttaactttttaggttgttagtttttaggaaattcaccgttgaccaaaatcttcttgaccttttattcaaagatagtctcacttttgcactatgttaaattgtccttagtctctaataagagaataaagaggtaaaatagtctaaaatctcacggtgctacatcattcaagacaatttttgttgacctgccctaattaacaagaggaatgatgtcagcaatataaaatatatagctattaaattttctggttctagagtgcgttttgcatgcttatattattgttaataatattctgcctaatctaatacaattaagattctaaatctgggtttaaattttgtccttactgactcacaaagtgaaattctcaatattcaccattaagatctttttaatattgatgtctaatttggtattcattagactaaaagaagaggtggtggtagaggggtatcagaggtatctgatttgcctgtctaaagaggcagaaaataaaagattaagctgttgatgtgaattgaggttgggttatactaagtaagtgtcttttcatgttcttgtcttccctcttaggggtgtatactctcctcattataatacagaaaggactaataccttggacctacctagtttatggttttatttcacttgattgtacatcctcctgaagttgggactgagatatagccatcctcttgtcagactgagaaactgaggcaggcagctgaaaggaccatcaacaagttaagggctttggcccttcccttttcatttaataataatccctataactcttagaaaagcattagagcagctgttgctctgcagtcagtggctttgatgtttttagtatggattatttcctaatcttatagacccacatggaatggaggtagaagcacagcacaacttgatattgattaaattgaaatgctaaaacccacagcacttattaacataatctctttgtttagctactccagtgatagaagtttctctcccactgtgtcaaaagttttcttgaactgagtgcttggatacctttagagctaatgccaacctctgtgctaatcttccatctcctttttctcctaacagctgtcactgaagtgtagagctcctgaagtctctcaatacatctatcaggtctacgacagcattttgaaaaactaacaagactggtccagtacccttcaaccatgctgtgatcggtgcaagtcaagaactcttaactggaagaaattgtattgctgcgtagaatctgaacacactgaggccacctagcaaggtagtaactagtctaacctgtgctaacattagggcacaacctgttggatagttttagcttcctgtgaacatttgtaaccactgcttcagtcacctcccacctcttgccacctgctgctgctatctgtccttacttgtgggcttctccatgctgtgccaatggctggctttttctacaccctcttttgagtgtagtttggtattttgtaattgagagctcatttcaaaagcagaaaaagacaacaaatattaaagcaaggaaaagtgtaactgaaacactgcactttactgttttatacttttgtacatatgagaaatcaagggattagtgcaaccagtagaaagcattgaaatgactgtcattaaccacacagtcctggaggcagagatgcagttacctaccctagcttttgatgggttctcttacctgtagtagccttatccctggtcatttggattttcagtttgcttttttctttttttcccctccaaactccttttccttggccaagccttcatgcttccccctttccatattataatctcatttgattgctctgcagttgggaacggtgatcttcttgaatgatgtttcagtgtgcaaaaactatagagcctgtcagcaccaaagctgacagaagttataccttactcctttcctttcccctgaacaaacctgctaatcccactaattcaggaatttgagtagagatggggaacaagaacccagatgctgtcccctcaccccctctcctgtatttctcaggtccagttcaaatctaaaattctacttttagagttgaaacagagtaataacttatctaaccctcttttcctacaaaggagaaagataaaaggcacaaaggttaccgccaaggcccgtcagctgtgtagtggcaaagccgagaccgagtctcctaagtccccgtcagtgtggttttcaccacaggactgtctcttgtcgttttcccctaatgccttctcctgccttttctgtgcctagtttttggctcttcacatattccatattgattttgacgctctgtatattggcatcaggtggcagctgaatatcttttgaattactcgaaggtaaagccagatgccagaatgaaggtgtagccagtgtttcccatatgcccctggagccccacttattgaggccagcagaataggtgcagagatgaagtgagcttagagatgttgcaaatgctctttatcccttcagctctctgatctgctctttcttcatgatacttagtctgcagggcatattaagatcatcccagaggttcaggcagttcctgtcatctctgaaaagactgggggatatgaaatcttccccctaccccacttaatgcgttggatatgatttttcaaagaatgcttcatgcccaaaataccagcctgtttagcagtgttacactgtttgatctgcgggcacttgttgcattgcctggcacccaatattcagggtccatgactaagactggtcttctcagatgccctgcttaaatcaggggcacttcaggctccacaggcgtcatgttggactgagacctaactcactggactcagaggaggaatcgtggaaaacaagagcaaaactaccccacacccctatttcatgtctgaaataaccctgtttcataccagttgcaaagcttgtggggagcggtcccacaaagcactttcttaaaccttgagaatctccaagagaaaaatatttggggaaggagggaggaaatatgtcccttgcacaccacccctgaagcacatggcagtaggaaacagcataggattgtatgtgggaggtggataggtcggtgatgtgtggagcggaaaagcaggttggtaaagttcccttcttgggacttattcctggagtcagtggatacaagtagtgcagaaggttcacactgcaaatagtgttctcatctcaaagcaaactatcattccagaaggaaaagtgtgtcagggcaagcagacaacacaatttcctatcagaatatgtccctcaacccccgaaacaaggcttctctcagcctccccaccagtgatggataacagctcctattctcagctgacctgactgagccaacccatgaactcttcactccttggggaagccacctcccatcacacccctgagcagagttagggaggaattctacttcccataaaaggacctctcctgagaggcaaaacctgttgcctccaccacggcttccctcttggctcattccaagcttggccaaattggggaagtgggatggaggttgccctgcatcccccctcctctgcctgagtgtgtctttgtaatgtcagctggcatcatacaaagagcaggagaagcaaacacccagaactcttttgctggtcagagattccctgagtgtctgtcctcacccaagcctgctctgtgtctgtgttgtgaagcttgagactctggaaagaaatggggagggggggcaggggaaatgttgccctaagaatgcttctcattcctctgttcttattgggtcctgtttttcgggagggtgggggttgggggaagcttgaccttgtgtcttcgtcaataaactcacatttacacaaaatgaagtttgtggtatgtatttttttccccagaactgacattctaggagaaaacacagcaggccagagagggacagaacattcataaccactctattaaaacttttctgactgccccagccctcccagggattcagccacatgaaattaagagtgacttgaggaagaatcatatacctcctgggggctccttttgaccaagacccaaagcaccactgcaactccaggcatctttgcaggcagggagtgctcagaggagtcaatctgtcttttcctggcagttcccctgctggggccccaggcaaatggtcccaggggcagtagccggagccacagggcctttttctgacttgtcagttggcatccagccagcagggcccagggcgagaggaatgcagcagagcttctcatcggtttattacccaggatgtctcaatcatctctcaacttacaaaagtctctcaaacccggcctcagggcctgcatattcccaagcaaatggaattaatcctgctttaaaacaagcttcccagggagttccaagactagaggcctgcatttgtgttgttgggggcatatgacccatatgttgtcaagacaggaggccccccgccaagcctaggttctgataagctgacagctgctgagatctcccactgcctggaatggggggaagaggctggaatgagggatctaacaccaagatgcccctggataagtccctgaacctctctcaccactagagtgaatgtagataaagcactctgtagcatttgagacttagtaggtgctcagcaaccgtagctgcctttattacttggatgtccaaaccccatgagcaaactgccttttggcagctaggaactttctggttgtctccatgttgccaggctgcagttagctgtaataggaaaaacacttggtgagaggggtcaaaccggggttgccagttaagaatgacgttaatttgggcaaagaaagtcctgaaggagaggttctcaactcttcggtgcacattaatgtcacctggagagctttcaaaaaagacatggttcagttcaatcagtctgggatggtacctgggggaatcagcatgttttaaaactcccaggtgttttctaacgtgcagtcaaggtcaagaatcactgccagagagagaggctcacacctgttcacctacttcctcttccacagtaatactcatgttctgtggcagttgaaaaatggttaaagcacttccatatgtacaatacctgcctattcccttacctatctcatgaatttaatttcatctccagtttacagatgagatgtggcagagccacgtcttctgactccctgtctgtgtccttagaactacactgtagcttcctccttcgtccactggaggttctgtaataggttctctcctacctctgctctcagccacatcccagcttgctaagcccctaggataccagtatgttcagagcacaccggtcccagacttgcacctgagactacactgtctttctctgcctgtaaagtgacaactaggaaacactgagatgtcaggtacattgtttctgaggtcagaaaacagctaaggactcgcaggtttgggctttctactcccacttcgtgcattaatgctttttctggttttgcttagacccagattctttttccctgccacccccagctccaggaggcaagagcctgtttattttaatacctggtatggcacttggaaaagatcacacctcccccgttgttacccaattctatctcctgaacactaatcctagaatcccaaccagcccccagacatgttattagcaacaagggatgtttcttgaaaagtttccgagttggctccaaacttaccatctcaatttctcatttagcttttgccctgccatgcttgatgctgccaacaaagggaaggctaatttgggggttggttacacccaggttctcagctggaaaagtgcttgcaatggctgtttccaagagcatcgttttgagacaagactgccatctctgggatcatttctcaatgctctggggctgagattactccactcatcccacttctcccaccgggtagatgttagaggatgatgttcaagtccagcctctagctcaccctctcttgtttcatttactcttcacttatggtcggagaccccaggatctggcctaatagcctctgaaagctcagtaggatcctcagctatgatggagcaggggcagaggtaggcaggtctgggtttttgacatttctgtcccacttcgtgtctgggcctcagctactgcaggcggtcccatgtgtctgctccctgagtttgcacctcagccaacaggcaggcatcctcagctgagccagacccacctgaggctcaaggtcagacccaagtacagagtctttcacatgttcccatcaaagtgctcctaatgatgggggagagtgaacaggctcctaggggtgcatgttcttaggccaaagtgactctcagcaaaccaagatgacaactgtatcctaacttcaggcaaatcttccacttcatgtagatagaattgctgtttgtttttttaaataaaaataatcctttaaatgacctttcactgaaggccagtatgaggctccataattaacctgcagctttgtgtttccctagtgcagcggcactatcacggctcactgcagccctgaccttcaggtgcaagtgatctgccccaggtagctgagactacaggtgtgcaaccaccatgcccggctgtttttgtatgctttttagagacgaggtttcaccatgttgcccaggctgatcttgaactccttgactcaagcattcagccccccttgacctcccaaagtgctgggattatagacatgagccatagcgcctagtgtattttaatttcttacttctagtccgcctttggaatggagggccacagcctgggggagcagacataaagcctgggatcctcgggcagggtgaggattagagattttcagatacagtggagggacaggtgatgcaatcaagaggcccttagcgaccccatgtgatcccacagggccagttaaaatctgatttattctccccaaaagtggtgctccaggaggaagccaaattcattccagccctatacttgcttctagctgctgctctggtcctttcatacccccaccccaaccctctgggagcctacctagaataaatggaaccgctgtaccacggtgttgctcatcctcctgtagaatgcctgcgtgtccctaaaaaggcaaaaagtaaaggccccatgctgagacttcctacatgccaggcattgtgttaaggattttacacacctcagctcatttacaccctgtcaacaacagtgagggacaattaatcacactccatttaataaatgagactatagacttcaagttacttgcctcagttacaatagtaagtggcagagtcaagatttaaatctagctctgtctgattctgaagcccaggctcatacccattctcctctgtgactgaacaggagagggaagggaggaatagggaaggtgcccaaaatgcagaggtcagactgtggaggaaaactgagttctgtttgggagcctgagagccggagcacagggtaataggaggtcacagtggaggatgcagggtcccaggggtaaaaacacttgggatatctctcaagcttctgctcctcctcctgccctggaggctctaaaatgcaacctgagcaggtgtgtccctgctttaaaactcttccatagagccgggtgcagtggctcacgcctgtaatcccagcactttgggaggctgaggcaggtggaccacctgaggtcaagagatggagaccatccgggccaagatggtgaaaccccatctctactaaaaatacaaaaattagctgggtgtggtggcgcgtgcctgtagttccagctactctggaggctgagacaggagaattgcgtgaacccaggaggcagaggttgctgtgagccaagatcgtgccactgcactccagcctggcaacagagcgagactccatctcaaaaacaaaaacaaaaacaacaacaacaacaaaaaactcttcgatgacttcccatccagcacagggctggatcccaactcctcatcctgtcaatcagggcctttgtgaccaacctctcgcctctccacccaccatgcttcctcatgggctcctgtctggttcccagactcacttctcaagcctgtgtaattgctcttgacttccgtagctttcttctgctacaatctccctccacccagccccaaaatctacttctttcaaggttgcttccttgaaagttgcctcctgcgaagcttcagtgactcgtctaatgagttgtcccacttcccctgccctccgcagaaccttgactttgcacacagcacattttaatgttgtgtggtctgcttttgatctcacgttggactgtgagcctaataccaaactcatcagtgactgctcagctagggactcccaatctttgtattcacattttacatctaagtgagacaagcttctcgacctcaactatctcatctgtaaagtggaggaaacaatctaccccgtagaattgtgaggattcaatctgaggatgcatgcaaagctcatagcgcactggcaaaatagaggttgcctatcaatgatgacattgattatgacatgacgttgatcattaaaggttagagatgatgacttttagaataaatacatgggtgattttgccctcaatcctgacaaatgctggtatctcccattctggagagaagaggcctatgacagttttaggggcgtggaggtcagcattggcaggggagaccttctttgtgccagccagctctgcctttcactgcagcagtgaagggtgagagtgatcacccttcgctcagcccttgaggagggtggaggagcagagcctggatgtctctaacacactgtgccgggcacacagtggcctggtgacaggcctgggcgaggggcatatgaggccaagagtcggaatgagcaaaggccttgagggctttcccatgcctttcttcagctcctccaagttacagctaaattcccgcagggagagtctggaggggtgcgaaggtcgaggccagggattaaagaattcgtccagggccgcccaagcgaatatgtcaggctcagggacccagcggaatgccagcccgcacccccgcaccccctcctccttccagcgcgagcaggcggcgcgctccggagggagagctggggctggaggttcctaccccctcggcggcccgcatctgcccccgcgcgcccgccctgagcccgccccgactgggcaggcgggggagcccctacttctctccccccgggcgggggagccggggggcagcgccggagcccggggggagctcagccccgccgaccggccggccagggcagggggcagctaggacggccccgggtaagcggcgggaggaggggaagcggtcaggggtggagcggggccgggtcaggggctcggggggtcgggccggggtcgggggaggaggagacggcctgggcgaggggcgtccgggactaggagggggccggcgggcgggcgggcggggaagcggcgcggggccgccacgtgagagctggagctgggggtgggggtgcctgcaaggtgctggaggcggagagcgagctgggcttctacatccccccaaactcctaccaatcaggtcatggggagcgcagcatcctctgtcgcccccagcccacccccaggcgaacgtggttggaacaaacagctggcagacttgtgacccggccctcgggatccgcgaagcccccgctctcagccttgggcagcgacccaggtgtccagacgcagggaaggggacggaaccaggcttcgccccctgtgtgtgtctctggtctcttgcctctctttccgggcagtctcttgccgggcgctgtctgcagactcactgcagagcgcaggccttggggagaaagcgctcaggggcctgggccctgcttcctgggacagccccctcccttccgcactcagccaagggtgttggattaatatactcttagatccaggacctctgcctggaaagaaggaaggggcaccgatcgcttctgagttggggacagggccacacttggacctgatgagttccaggaggctggccccagcctaggggcctcctgcacccccttcctagctcctgggtagtgcccctcttgcatttccctgccgctccccagaaagggctggtttctgggcagggagtgtggtgtccgcgacaatctgcaggtagggtgcatcctagaaatctctgagctgccacacccagagagaggccaggactcttcttggcgttccttgccctctcttcctcccctaggactccccactccccacctgcctgtactggttatgtaattaacccagctgagtctctctgccatgctggtggtagtggtgtccagggatgcctaaggggcttcgggacctggagggacacatggggaggagggataggtacttccccctagttgggagcccatgtaagtgtataaacacctgttggagaagggacactgcatggggcaggaaggagttcagggtcctaatcttagttaacaactcaactggctatgaggtcttcacttccctaagtcactgggtttgttttttggggggtttgtttgttttttaaaccttcaataaaatgagaagaatctctctcacgcacactgcatgcatgtgagctcatgcaacagtagatagcagcccctcctgggattgctaggaggttccactgctaagtttgtgggaagcttagatgaatgaatgacccctgcccatagcagtggtcactgtttattgaacacctactctggcctaggcactgggctttacatgcacacatcataacacttaataaagtttcttgcccaaggtcacacttcaggtgaatggcagagctaggaatcaagccctggcggttctcattccacatcctgacctgtatttactatgctgtgtgcgcacataccccgtggagtgagtcctctgaaccaggacaacctgggggacattcagctgtggcttgtgcatatgtggaaagaacatgcatctgcagagaagtatgcacccatgcggaaaagcatggccttgccagaatccggcgaacccacctgccctggagccagttagcaagtgctgatgtcaccctcctgggaatccagacaggaggtctcaggcatgtaacagcctctctggtcaccatcaccaacaaaagaagaaaggttctctccttttcctggctaagagatttacttggattttctcagaagtaggggctgttgacctcattttacctatgtgcagaagcatggctccagttgagaaggtgatttgcccactgacctgcagcaaggacacaccagagctgatgaattcgtatcaaggcccaaacccctagcagcccttttctgggcacctgctatgtgccaggccctctgggctctaggggatgccagagaatcagacccagaccttggcctatatgcattcactggttagaatcactgaacttggccaggcgcggtgactcacgcctgtaatcccagcactttgggaggccaaggtgggtagatcacctgaggtcagggattccaggccaacatggcgaaaccccatctctactaaaaataccaaaattatctgggtgtggtggcaggtgcctgtaatcccagctactcgggaggctgaggcaggaaaatggcttgaacccaggaggtgaaggctgcagtgagtcgagatcatgccactgtactccagccaacttgaaagttggaagaagtactgcgacatcgtagaaaggagtagctgcccttcgggttgtgattgggcacacttcttactccttctaagcttctctctaaagtgggaataacagtacttatcccttagagatgtcgtactgaccaaggataaccatatgggcatgccagcagagtaagtgctcagcagtgttgcaccccagaggcgacgtggtcatctagtgcagcattctcaactaggggcatttggaaatgggggcagggggagtttttggtcatcatggtgtctggaggctggcagttacctcttgggggccacggaaagcaaatgtcctgcaatgtgtgggcagtcctgcacaatcgagttctctccccacaaaatgtcaggagtgccagcactgagacacacctgcccagtcccacccattcaggaggacacagactcagaggtgttgccgtcttgtcccaggctctgtggggaagctgggatcaaaccaagtccagtgcgcttcccactctgctctgcagcctgttttggttggagttggacctggagaaaagtcaagtcataagtcaagaaagattgggccctactactggaatgcaggaaaaaatggaggagggatggagaggttttggaaaggcagccacaggggttctgggagagggaaggcattctaagtggcagtaacagcttcagcaaagtcccaaaggtggaaaagtgcaggacacgtccagggataagccagtgcactaagcccacctcttgtccccacagtccaggtggaggccgcagagggcccagggcaagcagaggcagcaatggttggtcctgacggtggctgagcccccagcccctggaatatgcagcccgggggagccccagacagcggcaaggacgaggtggcggagtggggcgggaggcatggtctccacctaccgggtggccgtgctgggggcgcgaggtgtgggcaagagtgccatcgtgcgccagttcttgtacaacgagttcagcgaggtctgcgtccccaccaccgcccgccgcctttacctgcctgctgtcgtcatgaacggccacgtgcacgacctccagatcctcgactttccacccatcagcgccttccctgtcaatacgctccaggtaggaggaccctggggggcatgggttagtggggaaacggatgggtaggggagaggctggattccaaactgctgtagcttgggccctattgccagggccccatcactgagtttgggagctccacactgcaccttgggccactctgcttagagccgttccaggaatccattcattggtgtgctagtttattcaacaaatatttggtgaccgttcaatgtgtgccaggccctgcagtgggcactggtgcagaatggtgagcaaaaaatttatggaatttgctttcaagaaactcatagtctggtgagaaaaggcaaatatggtgtgataagttctatgattggaggagcagggagctggggcagcccttaagggggcatctaggccatccagatgtgttggggtggagttggggggtcacagagggtgatgtctcaactaaataggttttaggcaggtaagagtcagtagagaaaaggacagggaacactaggctactgtgagtattcggagctgtgcctaccgtaacctcactccacatcctctggagaagggacagcagcagaacagacggggccctgggaaaggtgtgttcttggagactctggagaccccagtcaggtctcttgcccaaggccctcttctcttaagtgatgctctgcccctgacctcaggacctgcctgctgggcaccctccctgccaggtttggatttaaatgcctgagggtcctcacttattgtgttccttccccactgcctgctggaaccaggtcctcttgccctctctcaacctctgacttgagagggagtggagagaaaaaggaagctgagctctaggacatgtttgctcactgaaggaagcctctgaccagagtgtacagagcttttccaggaaggacaggcacagtggtggaggcccagaagacaggggacaaggctcgtccaggtgtaactgagcaaatcaagcagtctctcaggctgagaccctgggctgggagatggcgggcagctcagcactcagcactctcggcaacaccaggcaggagggccctggcctaatctgccggagacacctgttcacccatcccaggcacctggggtcaggaggaaagatggaagcctgatcccgcatctgccctggaagcagtgaggctgagcctgtcagggcagacagtctggatgcagggccttctagttctcttctaaaggagactttaacaatcacctgattggacattcaaatcttgctccaagcctacacactgagctttgttgatttcatcttgccccctttaccttgattcctgccccactctctataaccactcttatcgaatttttctttcttttttaaaatttatttatttttttattttagatggagtctccctctgtcgcccaggctggagtgcagtggcacgatctcggctcactgcaatcttcgcctcccgggttcaagcgattctcctgcctcagcctcctgagtagctggattacaggcacctgcgaccacacccagctaatttttgtatttttagtagagatggggtttcaccatgttggccaggctggtctcaaactcctgacctcaagtgatccgcctgcctaggcctcccaaagtactgggattataggcatgagccaccacgcctggtctcttatccatactttcagtgtttctttacccaagtaagaaaatgcattcttccctgcttcttacgtaaagaacaaaacaaaaacaagaaccatactgttctgtaccttgattttattttatttttaaaattttttgtatagatgggtcttgctgtgttacctaagctgatctcgaactactggcctcaagcgatcctcctgctttggcctctcaaagtgctgggattacaagtgtgagccactgtgcttggcgctgtacctcaatttttttaacttgctattataacctgaagatttttccaggccattatctagaggacgtcctcattcttttttcatggccacgccctactccattgaagagctataccatggagtcctttcttgttggataagtgggtggtatccagtcttgtgctgtttcaaacagtgccacaatgagtggccttgtagataggtcattttgaacataagtaggtatatctgtgggatcaattaccggaaagggcattgctggaaatggcactgctggatcacaatgcctggaaatggcattgtgaatacagagccaggtgaggtggctcatgcctataatcccaacactttgagaggctgaggcaggcggatcacttgagctcaggagttcgagaccagcctgggcaacatgacaaaactccgtctctaccaaaaatacaaaaaattagccaggcatggtgctccatgcctgtggtcccagctgcttgggaggctgaggtgggagaatcgcctgaggccgggaggttgaggctgcagtgagctgagagtgccactgcactccaacttgggtgacagagtgaggccctgtctcaaaaaaaaaaaaaaaaaagtgtgactgtaactggagtttggaggggaggttatttccagattgccctccatagcagtggcgtatgctgtgctcctgtgagcaatgtatatgagagcccgttttcctacagtcttgccatcagagtatattgtcaaacttttgacaatatatttgacaatctgagagatgagatatgatattctccttgtagtctccatttgcatctctgatcgtgggtgaaattgagcatctttcataggtttaagggcctttgtgtttctcttttcaagaactattgatgtcctttgcccatttttctattgggttgttggcttttttcttcttgactgaccctgagttttggactctaagatatccaagatttcactcctggagcccagtaagggacttttggcagagaaatactgtgaaaaaggtatcctcaaggcaccaaagattaagtataaaacctaagaatcctgatggccaccatctggaaacaaaataatacattcttctccaatgccagatgagatagagcccaggagagtagtgtttcctgggtgtgagcctcagtgtcttctgcagccccttctatcagagaaggaagctgagattatcaggtgcttgcaactcaccaaaggaattatcagcaaatgcatggttgagatgcaggtggctgagccttgtccctgaaactggactccctttctattgctccttctctgtcttgacagagccccaagatggccttttacagtttggaaccctgcttcctcccttcaatcaagggggaagggataagctagccaatcaggggccttcctcctctctcttttaggaacccccagagaggagtgggtgggaggaagccaggagttcccctcaaggaggcaacatgttgggggagaggtggggctgtcaccctcaaaagctggcagctgctccctctccccagcagacagcttgaagagactgggagcttctcatccctcccacttctcactgatctccattggtcttgggggatcgtgggagcatccgtatacacaggttccaggctcctggagatcactgtgtccagcagaatgcagtcttccctggcctaagaaaccagtttcctatggttttaggtttgtcctcggcatcctcccgccgcaccaaaaatttaaacctcagcacaaagaaaagatgccacatcatctccctagggaaatccactgcagcatcttctaagcctttgagttgggaagtgctgttctgaagttggacttaactctgcactactgccaccaaagtcgtttccttttgatccttcttggaagtggagaactgtagtcctcctttgtgcctggcccctgccccactcaattcagatgctgggacaggagacatacctccaccttcttctagtcttttgcctgggctttggtgggagaagactctggtttcctttgtccttggaggcctctgtccccccacctttagggacccccttctttccacacactggctgcctgaaaccgctcttgcagctggcacgttgactaatgaatctgttaaggaaacttctctttagtgtacttggcctttctaggagtctcttcaccttgagctgtaccccccaatcccttgagaagttgccacaaacattcaggaagttcatctccctggagctgcccaggggccctactctacatcagcccattatgcatccagtctgaatctttttctgtttctcaaccctgagggcagagagaagcatacagaaggggcacatcaggtagcagtctaagggcagtggcagaggcaggagttgcattgatcccagcttgggccatggagagctcaccagcccaggtagtgctattaaggagcacctgctttgagccaacagtgctagacactcagggaggaagagggagtatatacaaatgaggatggcctggctgtggccttctcaggagctcacagcagaagtggggaactggagatggaacagctctaatgaaagtgtaatagaaggattgttagaacacaggagatgaagggagtagtcccctgcttgcaggaaggatgggaaatcaggaagcttcttggaggtggtggcactttagctgaaccttggaagatagaattttaacaggtccaacacccagctcagagctggactcttagaggtacttaataaatgtacttgttgaacaaaggcctcgatggatggatgagggcacgacatggagcaaggcagagctaaactccagatgtgcacaagacagtgcagtggccctgtagatcaaacaatgtgacctgctccatcctggcttgggaatggggaggctacagctcctccattctccctgggcctggtctcctggggatggtcgggtatggaaggcttcaggtgcagtggcaggtgagagcactgcccctctgatgggaggtgtttgggggctaggggagccctcatggctgctctgaccctggtactggctggggatattgcaggagtgggcagacacctgctgcaggggactccggagtgtccacgcctacatcctggtctacgacatctgctgctttgacagctttgagtacgtcaagaccatccgccagcagatcctggagacgaggtgagaggctggaacacagtccattgccacctctgtggatgccccagtgctagccagtccctgtgaaaagggcacagtatagggacacagatagaggtatatgtgttctaagatttccacacatacactcaaacatgcatacattgtgctgttcccatttctgtcaactcatgttgggaccgtggctgtgggggtggctagagtagtgcagtagttaagaactgggacttctggaacaagacttccagggccactcagctgcatgacttgaagccagtaaacatttaagcctatgtcctcatctgtaaaatggggataacagtagaacccatcttttaggtcagttgtgctgatcagagaatataacacctccagggcttagggctgcgcctggagcagaacctacggtggtggtagtattggccaggcacagcctgccctgctgggagtacagcggttgtggggctgacagagttctgagctgcctgcctcgccccacagggtgatcggaacctcagagacgcccatcatcatcgtgggcaacaagcgggacctgcagcgcggacgcgtgatcccgcgctggaacgtgtcgcacctggtacgcaagacctggaagtgcggctacgtggaatgctcggccaagtacaactggcacatcctgctgctcttcagcgagctgctcaagagcgtcggctgcgcccgttgcaagcacgtgcacgctgccctgcgcttccagggcgcgctgcgccgcaaccgctgcgccatcatgtgacgcctgcgcgcccctcgggctgcaccggcactggccgagcggagggcggggccgtactgcggggctggggcggggagcgggcgggaaatggaactgtgacggtcccggcctgaggcccctgcagccacgcacctcccggtgagaagcagagcgcgagagggagccctccgtaactgcccagccctgccccttgcccccgtggcttcctgggacagccgccttcagtgctgtatttagtgcagtgcccggcccgacccgcgggggtgccacagccttttgggatgggggtgagcgtgcaatggaggctgggggtggcgaggtgccgccttggccgggcccccacgtgtcttctccagaatgtgtctgtctttgcctggtgtcttcctttcccgtgtccgcccaccccagcgtctgttggtacttacctgtctcacctaccctccagtcccctcccagctccgctcacagggctctcatttcgtccatccccttgtcgcagatcctggcagcttctttgtgaggccaggccttctgactgtcagcaccaccggcacagggcagagatgcgggtggcccaaggaccacgatcaaggggtccgggggaccgaggtcccagatcagtgaggggagaaggttgagctctccggcttccagggagacctccccgcccagcagcccccagagacacaacaacctaccttccagccttaactcgatggtccgtccctgccaggtgcccctcactcttcctgaccccaaagccagatcaccccctgggttaaaactttttttcttttttttttttggacagagtgtggaaagggagccccccaaaggatagcttctttttcatgatgccaggctccagtcctttattcccttctgcatactgcaatctgatctgtcagactggggaatgttgggttctggggtctggtcgtgggcaggatggtgcccagaagggggttaggttgtcccagtgaaaattctgttgccccgtctcaaccccatctgactaccccagactctgcctgcctcagatctcagactatcctgattaatctggggaagaacagagccagggaaagaatggtggggacccctgtacttgggggagacacacctgcatcttcctcctgccacagatggaggccctcaggatctgacaccctcttgtcccaacaccagtcagccctataccctaactcactccaccccattttctccggctgcctggccgggtttctacctctcgtcaccggagctgatcactgtcagttttgtaccgatttagaaataacaataataatgaagattctaggaatggcatgagggattgatgggggacttggagggagggacaagtggtgccctgtcccctgctcccctggccaaagaaagctgtccttgaggctgagccctcagccctggcctggtggggggacagcaaggtcccttgttataagaggggcagagaggacaactccgctttggccaacctagccaaggctgcagcatatagaccaggaaatcaggtagcccagactggtgatggagcagagtctgggggaagggtcgtgggtggggaatttatcaccaacatccattgtagggggaatctatgattctgcttccccagcggattcccactctgtccaccaagtggggggtagcacagcctcacagcaaccgccctgaccttgggcagtctagtgttcctgcattctagtccctgctgtgctgcaggactttgggcaagtgacctgccctctgtgagcctccctctgacacagaggaggtggctccccttccccacaccttagagtggctgggagggtaacaaagagggcctgcccctttagtctcctgcacccctgccccctggttcaccagagggagcggatgaaggatggcagcatctcacatgccccatcaccaactctgaggcacctggggtgggggggcggagcccaggcctctggctgctcccctgtgggagccattggaatgtatcccctgacaggcccccttccgcctccacctcaacccaggtcttggatttcaggtccctccacccccattctgagtctctgtccttctccttccacccgctcccagggtttcccaccacagggtctggaagtgtgtgtgacgcccattgagctgttacccgaagtcagattaaaaatcagggagtgttttccctcgtttctgtaccaaggtgttggctccattcctcatggtaggaggggaggggtccccacagggcttgcctgctgagctccgtgtggaaggagggtgaaggtggtgaggtggcccccagtcccaaagcccaggtcaacagggagaccaccggtgaagagtttgggatttatcacctttccacctaaccccaaaccctccagctaattccaaccattcagaagggaagcagaacttctcccctgccactgtctggaaaatttccataatgggactcaatcccagcttctccgtctgcgtctcgtccttcccactcaaggctgagactttacagcctctcagtcataacttcttggatgtagatgtgttaggaacactttcagccacccgtcttgtccctgagtgatctcaggtcccaaactccagagcaaagctttgaaatcttgggcaagggtgccttgtgggagcctgtgtgttgagggcaggactggtctctgtccgtggtgctgacccaccagccacttccaggaaagatggggctgcctggcaaggttggctgagcctcaaaagaggaagcctctctcaccaccaactccttccttctagtccccatctcctccagtgggataacatctgaagctatacctccccgcaccaccacagtcctggagtgagggactcaagaagctggggggcagggggaggcaggttcagtggttcacatctttaatcccactgctttgggaggccaaggcaggaggatcacttgaggccagcctggacaacatagtaagaccccatctctaaaaaataaaataaaataaaattagccaggtgtcatggcacctacctgtagtcccagctacttgggaagctgaggtgagaggatcacttgaagcctgggagttcgaggctgcagtgagccatgatagcgccactgcactccagcctgggtgacagagcaagactctgtttctgaaatttgaaaaaagaagctgggggctcaagggcagaatcacatgcatttaataacttatgggagttatggaaacaggtgggcatggccaggggccagaggccaggagtgtggtgagccgttctaggggagagtaatgagatacaggatggtcctactgcccctggcctacctctggagttggagtgagagcagtgggttgcccctttgctcagatgagcagatggagtctatatttgtcttctgacccactcctgcccaaggccctgtgtggaggtgagggaacatcccttctgttcccgcagctgtgaatccagtgtatacatggccatcctttttgcttccctcctacccaacacgctcatgtgcctcagacccaggactcctcctcaggtggaagtggagcttgattaagccagtgaggttgcaggccctctggaggttgggggctgctctccaatggagcggctggctctttctcctcctttccttcctcctcctcctcacctactgaagctccatccacccgggatgcctcccctcccttgctgcccagcacagctctcaacagcctgtccttggggggctgcctggctggacccaggaagacataggccagtggcctggggattcgtgaaggctgcttctcaggcctgtggtctctccggggccgaatcctgggtctcagcttcagcttgtagatggacgggaccctcttgggcttccggagagttctcctgcccttgctcagacatgccttggctttgtcagagttggggtccaagggcgaaggtgtgggggcctccgggctggcagacacagtagaagccgagcagtcctgccctccctgaggtgggaccttcctcatgtgggtgcccttggcactcaggcttgcctttgtcctgggcccactctgtctggctcccaacttccctttgaggcttcccggtcctggggtaacagctggcttaggggagccagtcggggctgccttccaggcttccaggtccactttaaggagggatggggacccctgagccagttcttggatggctttgtcataaggacccccaggctcaggccactgcccagccagcctggggatgtagaccccactgcgagggatgaccccagaccttgtgccctgcggacaggcactcctgacttctagcagcttcatgttgcccaaaatctcctcttcaaggctacagtagatggcttgctccttgttcccgcccaagggcagaggtgtgtaccgcccctcctgctcctgtaggcccaggtcccaggactctctggcctctgccatgacctggatgtccagctgctggtcctcctgcctcacttccacagagcagtccccatgcgtggacccagccaggtccacagtgacggcccttagtgggatggggtctctcccaagttctgtcctgggacttccacttgtagcaccaggaaagctccttcctggtgttggggggcgagcagggggcagccggatggggatcttggttaggccttggacaggggttggagaacggacagactctggctccctgaactggaagaacgcacccttggcctcatcccggagtggcagcctgaggcccaggcactcggctgggccaaaggaacgaggcaggggagatggtcctcttgctgatatccctttggtggtggcctcaatggctcggagtctttgtggggtggggttcccggcgtcggttccccagctgtctgtttcttcatgaacccaagatgtgggaatccttcccctggggagttcaggggggtatctctcctccctctttcctgacgaggtacactgtgggtctcggcctttttgggtagatgaggactgggggctgggtgggctgtccccagctgtcggctgcctccaagatgggatgagagacctctcctggcacctgaaagggagaatcacaaggctgcaaagggagactcatcaggccggcagggtcatctagtgtggtccctggctttgggaagtgacagtctttccccagtgagaacacccaggaggctagacttcacgctgaatgaaacctatgctccctctcctccgtgactgcccagaaatcctccttatggcagtcactgcctaagtctattcgcccttgttccctgtgtagcagatagaaggaagcctgatcctggcctgaggtgacttcagatccttcgagggatggcctcagaccagttgcagggcagtggagagacagaggggaatgcacagtctctgtcttagtctctgctctaccatgaaatggtaggaaaccttcagtaagtctgttccatttctgagcttcagcctcctcatctgtgaaatgggaaggcatatgaagtaaccacattatcccaaaggtactgggtatgcttctggttccaaaacctgtggtctcggggtagaggcactgccgaggatctgctccttttatcttggagtgtggtgacctctgagaatgtgcactccaaaggaaaaagagccccatccctgtctcttccccatacctcaggaatggtgccatctctctggaggcccccgtccctgctccccgttccctgcggggtctgggggaggatggggtggggggcctcagccttcggtctgaagaggtatatgtcttccagtccacagggggtggtgggctctgtgagcggctgatggtcattgtaggctgggtctgtgagggtccatcctgtacccttacttcatgctgcactggtggggccgggggcttcaggaagctgcctggcttgtgtgctaccaacagtcccccggagaaaggagaggagagaagggttcagttcctgccaatggggaccattgttcctcccccagtggtcccatgccccgcatcccacattaaaaacagtgggacctacagtggcaacaccggagtttctttacgggaggggcttaggggacccagctgggggatttatttaaagctatgtttttagtgcgggtacacaactttcccttagagcatgtgcttatttggagtggctggaggcgttgatggagattatggaagaattaaagaccctccaagtcacacttggtgccaacactgtggatcccagagccagacctaagctctgctaaaatgcaccgtggccaaatgctgcttctgcgtgtgttgcccgccatcttgtggcgacatttagtactgtactgtgcccaactactgcctgccttcctccagcctcccccacacctccccacctaccgctcccctcctggagatcagacatacctcccacctctgcctccagcctcccaacccagagctaggcctcttcaaccaaccccacagggagagggccctcaggggactcacagagggatgtgcagcggcaggggtcatgtttgtccaggtaatggcccagtgtgtcccagccgccccctacacgtaccatcacatggttccggaggatctgagggggcaagggtgaggttaagggcggggtggagggcagcccctcttcctggaccagctcgcgggcttccggcactcactcagggatgctctcatccatgtacccatccacacgtagatgtatgtgtgtgctgtaaaaaggcagcccgaatctcctcctccatgactggcatcagataacacatgcggtcaaggtgggagccaggctgaaagctgtcccacaactggtcaagggatcccaaagcctgcccccagagcgctccttttgctgtaaacggttttgcatctgtacatgcctgtacccaaaacagggccctaatgccactggctttgcccctgtggcctgtgtggagagcccatgggagtcctggtcccactccaccctcaggcaagtcacatgtctcttcaagcttcagcttcctgtgttgggaagtggggccacaggttcttgcccctatctgcatcacagggctactgcctcaggtctaggggagggcccagagagctggctctgctcccaggtttggcctgtgcccaaggaaatggctgggccatgccccgagctgctggccgctcatgtgggtacagaccgtttctggtgaggcacagccaggtattggggtaggaggcacattttcagacctgtgctgctactcactctgctgaatgtacccccaggcaagtggtaggggtggaactatggggtccatgtggctggggccgtgcactgaaaccaaacttggggttctcaagctgcttcctctaatcaagtctgtgggtggagtggaatggaaaagtgtgatcacccttctccataccccactctgcctgagaacatgctctagattaggctacagtggaggagagggagggtggtggctctggctgccctgatgggaggaggagataggcttgccacctttgccaggaatctcctggaattctcccagggtgagaaggagagctccaaggcctgatggcttggggtgaatgatgacttactgtcattgtcctcaagcctggacaaagtcccatattctgggaggtgtcattgttccaagcctgggcaaggtcccatattctgggagacttagtgtcattgtcccaagcctgggcaagaaaccctattctgggggtcccttgacccccagcctggacttacccggatgaagatgagggtgttggagtcacccacacggtacttcccctcagacactttgaccatggagaactgcactgggcacgtgcagtggctcacaaggctctgcacctgcgggcgggtggtgaactcagccctctcctttgcccactctgggtcaaaatggggggcctacctgccccccaggtcacccctgaggtttctgctgaggtcagagctggggaatgagaagcaaggagggagtagataaggctgtaaatgacccagcgagaacgagacctgggtggtcacccatggacctacctaccatgaggtccagagctgatggaagcggcagagtgccacggggggactgtgggatctgacaggctcaggtcagtgccctgtatccactgcatcataggcttttcattaagaaaactgcctgagctccattttccccaggggttaaccacacagaactaattgctgtgaagtggccctctgtgcagaccctgttccaaacactttgtatgtgctggctcatttactgattacagcattcatagaaggtaggtgctgttactgtccccatgctgcagataagggaagccagacacagagaggttaaataatttgcccaaagtcacacagctgcaaagcagtggaactaagacttgaaccaaggtgtctcggagagtgccacagtcggtgttcttgaaaactgtcccagcaggggttaaatgagaggggcatccagtgctgggttggtaagaacgcctgagaaatgacatggccattaattactacgcgtggttagggttgaggctcagagtggaaccgtgccttaaagccacacagtgaattcgggtcagggtggacaatggagctcaagaagggggtgggttagtgggggctggagtgggactggggagaggagcacgaaggacaaagggaagggggccctgagggcgtgtgcagagcccctcaccatctggtccaggttgcggaagtggcagggctggcgcctggggggcgctggcggcgaggggtcgggcgggggcagggccagctcccgccgcacctcctcctcgatctcctcctccagctgcacgagtgtgggcgccgcaacaccaaagcgccacgcccggcggcccagctccagcaaacacagcaccacgttcttcacgttcttgcgcagcaccaagtcctccgtctcgaacatcagcacctctggagtggaggcggggagaaaagggcagaggcagcgtgagcccccagaggacctgagcctccggggcaggggctagcggggaggaaagcactggggtcatccccggtctggggcagcagacatggggagtggtttgggtctcagaatcttggggtcaagtcagccccctaggaggggtctgggcggaattgctcaggtgctgggtacagacacgcggcccatctcacaggagaggctgcgggtgagaagaggtgacagcaaagcaaagggacctggagactggctgtgactgtgactgtggatgagagaaggatgaactccaccttcccctctccccactcagcttgcctggatgggtccaggagcaggaagcggtttgttccactttccacccacgcctctctcctcctatctccaccaggcatctcaaactcagctcccacccaggcccaaccaggcatgctgaggacatgctctggagccaaccactaagtctggagtcctgacttattaccagccgcatgaccttgagctagaccctgagcctcagtttcctcttctgtaaaatggggatgtagtctacttcgtggggttgttgtgaagattggatatgctcatagttgctaaccattcacaatgtccggcacatgcaagcattccttaaagcactagcttctattaaccttccaattctgttcctcagtgcccagccaccagccagtagcccaggcctgaccctttccccagtctcacccctgccacctttggcctggagaatggcacaacatccagtctcatcccattcctggtttcaaggccaatgagatgaaggatcctgacatgtcactccctgagccctacaagccccagcatgatggagcccctccctggcgtcatcccatctgtctcctcccatgttctctcctcatcctagccctgtgccctcaccaccagcctctccctagtcattcacacaccatgctttttctgcgcctttgcccctgtcatcccccctgcttagaattcccttcccataaacttctatttatccctcaagactcagcccagctgggtgtggtggctcacacctgcaatctcggcagtttgggaggctaaggcgggcggatcactttaggtcaggagttcgagaccagcctggccaacatggtgaaaccccatttctactaaaaatacaaaaattagccaggcgtggtggcgggcgcctgtaatcccagctactcaggagatgaggcacatataattgcttgaacccgggaggtgaaggttgcagtgagccaagatcgaaccactgtactccagcctgggtgacagatctagactcagtttcaaaaaaaaaaaaagactcaggccaaatctccttcctttatgatgcaaactttctcggccccattccacctaatcaggctgctatttcctcccctggctcccagcattacacctctaggtcaagcctttgccacagtaggctataatttatgtatctatccctctacctctctctctctctcttttttttttttttttttttttttttgagacagactctcactctgtcacccaggttggagtgcagtggcgccatctcagctcactgcaacctctgcctcctgggttcaggcaattctcctatctcagcctgccactatgcccagctaatttttgtatttttagtagagacagggttttgctatgttaggccgggctggtcttgaactcctgacctcaggtgatccaccggcctcagcctcccaaagtgttgggattacaggcatgagccaccacacccagccttctgcctctcttgctagaccatgaatttgttgggcgctgggtctctttcctctctttccttggtgcccagcaaagtgctcagcacagaagaggtgcttgatatatgcttattgaagtaatcatcaacaaacatttatcaatcatcaatatatttatttattgaggatttactatgaggtggggaaactgaggcatgaaaaaagagctggttcaaggcaaatctagaatgaggatccaggctcctgccccccagagctagcctgtgcatttgagaaaggaccaataccccccaagataagcatctggaatggggacgagggtgcagcgtggttaccttggatgcccatctcctttcgacaccactggatgaagttagagacattgtccctggcctggaaggtacctggctgggcggccccattgcaggagaccccgacccggggcatgggaatcttctgggcttgggcaggtgcctcagccaggaaggccagggcagcgtcagtgacaacgttggcgtgttggcacagcaccaggcccgtttccagcacctgcaggaagttggctgcgtcgatgtccagcccatagaggtcgcgaagccactcagccaggtcttccttcatggcctccaggtactgctcactcgacttgaaaggccggatactgcacacaggcggccctagggtcctgggcttcctcctgcctcccgcaggctgggacatggctggaccccagcagggcaggaggtgggcacctcccctctcccactgccgcctctttcctcccgctgctgctgggtctcggctgggttcttcctgattctgaggttcccgtgtactcgctgagagcccgggacctccagtgctgctacttgccactggcttcagctgccaggcctggcccagcccctgcccccccacattcctcagtccttgccagagctttccctggtggccctgcagcaaccttgctctcaggctgcccagtccacttggagttcacccctctgaggccagatggaagtgaggacactcctctctttccccagagctggagagatcaagctggctgcctcctaccctctgctggctgcggccacagagcctggggtggctgccggcctccccactctgctttcctcccctctccttggagacagcggctgctacaaacactccttgttaacccttcccagcaggcgaggactgccctgcagaaccaagggagagggaggagaggttggggctggggctggcttctctcacggggctggccaaatgggaactttgggggagtggagggaaagcaggggtaggggttgccataccccttggtgtttagtgagtacaggagaatgggaatgaaacagacatagaaatagggcccaaaactcataagtgtagccttaaatcctgtgtgaccatcatatactacctagcctctctgtgccttagtttctcaactgtaaaatgggggtaataatgtttacctttttggtgtgttgtgagggataaagaaataatgtatgtgaaagtatcagaccatcagaactcacaggcaggcacaggtctgagtgggtcccagttctcccggcagctctgttagcaccatgatccccactttctctgaagaacctgccccaccccccacactaaccatgtgattgcgctacagcaggctgtgggtcataacaccctaccacccccatggccacagcaatgcattcattcaaccaacatttcttggttggtcacggtgtaagtgctgcctgtaatcccagcactttggaaggccaaggcaggaggatggatcacttcaggccaggagttggagaccagcctgggcaacatgatgaaaccctgtctctacagaaataatacaaaaattagccaagcatggtggcacgcacctataatcccagctactcaggagatcgaggctgtactgagccatgattgcaccactacactccagcctgggcaacacaacaagaccctgtcttaaaaaagaaaaaagtcttgagcaccgactatgtgccaggcacaactgcaggcctgaggatacagcagtaaacaaaaaagaccaggtccctgaccttatgggggctacttccatgttaccgagtggtgaatgacagatagacaaataaatctaaggctgggtgtggtggctcatgcctgtagttccaacactttgggaggctgaggtgggtggatcgcttgagcccaggagttggagaccagcctggccaacatggcgaaaccccttctctactaatacaaaaattagccaggcgtggtggtgggcgcctgtaatcccagctacttgggaggctgaggcaggagaatcacttgaacctgagaggcggaggttgcagtgagccgagatcgtgccactgcacaccagcctgggcgacaaagactccatctcaaaaataaataaataaataaataaataaataaataaataaataaatagtcagatggtgatccattccagggagacaaataaaggaataaaggaggcgagggtatgtgtggaattttctataagatggttaaaggcctcagggataaggtgataattgagcaaagacctgaaagaagatcggaagcgtgctctgcagctgtctgggggatgagtgctcaggcagagggacagccagtgcaaaagctctgagacccccatctctacaaaaactttttttaaaagttagccaggtgtggttggcacacacctgtggtcccagctacatgcgaggcgaggcaggaggattacttgagcccaggaggttgaagttgtagtgagctatgactgcaccacaacagagtgagatcctgtcgaagaagaagaaggagaaggagaaaaagtaaaaggagaagaaaagaagaagaatccctaagagaggtagggtatgtaggataagaatctaggaaatgaggtcctagatcatgcagggccttgtaggtgactctgaagagtctggctttttctctgagtgaaatgagaagtgccctagagtgttttgagaagggtaggggtggccgggcgcggtggcttacgcctgtaatcccaacactttgggaggccaagatgggcggatcacgaagtcaggagattgagaagagtagggacatgctctaattcaggctgctgtgcgaagaagaactgcaggggcaaggacagagtcagggggacagttaggctactgcagtcatccagggcagagcaagggtatcttaaaccaagtggtgcctatggagttgatgacaagtagtcacattccatattaacccttgaaaagttaataggattggtccaaaacagggttccttgaccttggcgctattaacatcttaggtcagataattattttgctgtggaggttgtcctgggcattgtaggacatctagcagcatccctggccactacccaccaaaagccagcagcacccctgcccccatttttttatttatttttttattttttgagacagagtctcgctctgtcgcccaggctggagtgcaatggcatgatctcggctcactgcaacctccacctcctgggttcaagcgattctcctcccccagactcctgagtagctgggattacaggtgcacaccaccatgcccggctaattttttgtattttagtagagatggggtttcaccatgttgcccaggctggtctcaaactcctgagctcaggcaatccacccaccttggcctgccaaaatgctaggattacaggcatgagccgccacacctggccccctgcccccattaaaacaaccaaaaatgtctccagacattaacatttggcaatgtcttctgggggacaatgtccctggggggcaaaatcctctccctccccactgagagccaataatctaggaggtaagcatgggactcagctagtccaaacagcccttccctgggcttttaaaattggagctatagggccaggttcttttcccaatcagatggcgaagatttgggggatgcattcctatcacacagagaaagcccttctgcaatagaggcagccacatgtctgcctttattagttagggccaagctaagctgctacatataacaaaaaggccactgaaaacagtggctcacacaaaagaaatgtttatttccctctcttagagacagatgatccaaagtaggcaagtggctctgctccatgaagttctccaggcactcggttcctttcttgttgcttctttaggccgttgttgttacttacatagtcaatgccgatctcccagaactttgtcctcaggctgcagtaaagcagaacagagaggacggaatgcaccaagttcctctttcatttttttttttttttttttgagacggagtctcgctctgtcacccaggctggagtgcagaggaatgatcttggctcattgcaacctctgcttctcgggttcaagtgattctcctgcctcagcttcccgagtagctgagattacaggtacaccgtcacgcctggctaattttgtatttttagtagagacagggtttcaccatgttggccagggtggtctcgaattcctgagctcaagtgatttgcccaccttggcctcccaaagtgctgggattacaggcgtgagccactgcgcccggcctatctttctattaagatgttctccactgggcatggtggcttttctatttcctaagaggactcagaataagtcatagggcctgtctgagttgttctccagagacaagggaagaagtattttcctcccttgagcatgtttaaaaagactgggccggacacagtggctcatgcttgtcatcccagcactttaggaagccaaggcgggcagatcacttgaggtcaggagctcgagaacagcctgggcaacatggtgaaatcctgtctctactaaaaatacaaaaactagctgggtgtggtggcaggtgcctgtaatcccagctactcgggaggaggcagaattagccactgcattccagcctgggtgacagagggagactctgtctcaaaataaataaataaataaataaataaataaaataaaaaatagactgtaggagacaaaaatgaaattgttttataactatactccatgagtcccacttgatcaaaggtaccaattacaactggtctaggacaatcttgacaaccctctttttgccataagttggtttaggaatgggtttgtgctccagttctggccaatgagattcaaagagaagtctgttggagagcttctgagaagtctctgccattccttttcttcctgctttggtcatagttgcatgaagccacaatgcctggagctgcagcagccattttgtaaccaagaggagacaaggaaggcaaagaggaaaggtgagaataagcagggcccttaataactccatcaagacactgaaccaatcctggagccctttactaagtaaattaataaattgtataaagtttgagctattattagttaggcattatggatttgactagccagttacatcttaattgacatgatgctctaagtttaggaggccccattccttttctctatacaaatgtaagatgttgttacaaatattcccaatcaagtagcacttacatactatcttactggattattgttctttgttgttcttaataaaattttttttagagatgggggtcttgctatgttgccgaggctggagtgcagtggctattcacaggcgcaattattgtgcactgcagcttcaaactcctggactcaagcaattttcccatctcagcctcctgaattgccaggactatgggttcccctcactgtgccccgcttagatattattttctcttaagttatatttatggcccaggcaaaactaatattgcatttctgtgtcatacctattagaagttaaggagctatttatactattaatttcaaaagttaaagtttaatatgaaaaaattgtagctttacctgtgataactgactttgtcttgtcttttaggtattatttctataaatagcagaaaataatgcttgagcttgccaatagaatatagcccattctcttctggtttcaaacagtctcttttggagagatattcagtcaattctgagttttcactcattaccgggatggtttcacccctctcaagaggtctcccaagcagacgtctgagtgcaggaggcatacatatgttcctggggttagtgggattacctgcttgctctcatgttttcaatgaagactatactagtcctctgtgagatcaatttctagtgtgctgggtgggcatggtggctcacacctgtagtcccagcactttgggaagtcgaggcaggcagatcacttgaggtcaggagttcaagaccagcctggccaacagggtgaaaccccgtctctactaagaatccaaaaattagccggacatggtggcacacacctgtaatcccagctactcaggagattgaggcaggagaattgcttgaatccggggggcagaggttgcagtgagcttaggtcataccactgtactccatcctgggcaacaaagcaagactctatctcaaaaaataaataaaataaaataaaataaaataataaaataaattctagtgtgcttttatgctagcatgggttgtttgacaatctgactttttaggaaggtcccacaaaacccaaaacagccttgggaagaggggatgcacatcctaaggatggatggcaaagggctactaggcagattagggttggggaggcaggatgagaagaatgaccatgccaggggacactctgttgtggtgtcttggtgggatggtctttgaacaggctcactggtttagatgtgcctgccaggggcattaaatcttagtgagtgtctcagtgagattgctcatggtgccagtgtccatgggtgacccccagcagtggcctccaaactgaattgttcctgtaatgcgatcttgactgtgttcttattcgccacccttccttgattcctatccagttctcaagtcttttggtcattctgtgaggtctcactattctttctctttaaatcaaccagagtgtgcaatcaagagccatggtggctttcagtaagtttaaagagaatgagcttgttgggagacaattctccttgagccttttgtgtttatgcatgtcttgaaagcagaggccctgacttttcaagggtttttggataagtgagcaatcttggaaaatagacgtagtgcctcctttctgagcaaacagcaggtttgctcactaccaattataaaagattcaggtttcctggctgggcgcagtggctcaggcctgtcatctgagcactttgggaggccgagacgggcagattacgacgtcaggagatcgagaccatcctggctaacacagtggaaccccatctttactaaaaatacaaaaaattagccaggtgtggtgacacgcgcctgtagtcccagccacttgggaggctgaggcaggagaattgcttgaacccgggaggcagaggttgcagtgagccgagattgcgccactgcactccagcctgggtgacggtgagactctgtccgctaccccccaccgcccccccaaaaaagattcaggtttcctaagcttgggatttctgtagtaatgcaaacctctgcatataccggtatccactggcactcatttgtgtcactcataggacaccgaagcaagggaagctgaggcaaacaggccaaagttgctgtgccacgagtaataaagtcctttgtctctgacttggagcctcatgttttctggcagcacccatgaaactacaactagttaacatggtagcttgcaaataggataacatttcagatccttcacagttcttgatagggttgcccccttgtgactacgagattcctgggggccaggtctgctctctgttctccagcccatcaacttgcctccaccaaacttagatgcccaaaggaagggactccattgccctccactctcagacttggatggaggatcgcagatcactattagactgggctctctttgaggtcagcaacttcatctcaacagatggagggctttccagagctgaatctgtccattgtccatctacacattcctctctgtgccaacacactccacttcgagtccaggaaaggaaaggattttcctgaagctccttgattttactccctccctcacccctgccccccaacaaatacacaatatccaggagctataccagcctggtacccgagtcctacttcctactggacttggcaccattcccttgtgttccttggtactggcaatgaaatggaaataggagaagtggagagcatggggtgaagaaggataaggataagacaggaagaggaagacagaatataatgatacaaacaaacccagtgctttcagtgcttcccataggccaggtaaagcgtggtactgtattactatctctgacttacagatgaagagactgagggtcagagagataccatgctgaacatcagataacttttatatttatgtggtagagctgggatttgaacccagtttattgcgggccaaagccatcctctcttcccctttaatgccttcctaagagggaaggtaggagacatctgagttgttagtgctttgggaggctctggaaaaggaaattattcctgggcagagccttatgggcaggtgaggttctagccccaccccttgtgacctaatagaggccctagacatgagacaaagttctatgggttctgggcaccctctcacatcccagtctctgatcagggaaagcagggcacagccttgggaagaatggataagcatggtgagtggggctggaggcagggtggggctggaggacaggacctcttgaccctagcttggacaatccagcccatcaccatgaagtccaaccttttctcagttacccatccatgtagctgcaagccctctcctttcgccttcctgaattttttttttttttttttttttgagatagagtcttgctctatcacccagactggagtgcagtggcgagatctcagctcactgcagcctctgcctcccgggttcaagtgattctcgttcctcagcctcccgagtagctgggaccacaggagcatgccacaacacccagctaatttttgtattttgtatttttagtagagatggggtttcactatgttggccaggctggtcgcgaactcctgacctcaagtgatccacccaccttggcctcccaaagtcctgggattacaggcatgagccactgtgcctggcctgttttttgtttttttttttttagaaacagtcttgctctgtcacccaggctggagtacagtggcgttgtcacagctcactgcagtctcaacctcccaggcacaagtgattctcctgacttggcctcccaaagtgctgggattacaggtgtgagccaccacatctggctccagaatagtcttaacatctgcttcatcatctccacctgctcctgttcagacctttgtcttctccggcctggaccactgtaatgactcctaagtggggtctccctctgtcttgtcagagggaacatcctaaaacacagcttggaacacgtccctctacaagaatgttcagcggctcctcactgctgagaggcaaagtccagattccatagcgcagcactcaatgtccaaccctttgttttcaactccttttcctcctccccttcctcttgaaacatctctggaacccttttctagctgtgaactaggcctggccttttacaaccagaaggctagaacaccaatcatgagcagtacctttgctctttaaataggatggactgggatcaaaagaaacgtttctttttctttctttctttttttctttttttgagacggagttttgctcttgttgctcaggctggaatgcagtggcgtgatctcggtaaaccacaacctccgacccctgggttcaagcgattctcctgcctcagcctcctgaatagctgggattacaggcatgcactgccacgcccagctaatttggtatttttagtagagacggggtttctccttgttggtcaggctggtctcgaactcccgacctcaggtgatccgcctgcttcggcctcccaaagtgctgggattacaggcatgagccaccgtgccccgcctagaaatgtttcttgacttttccatagcaaactccacgagttgtgtcttccctgccttcctcccctctttcctttacaaacctagctatccagatgtgacagacacaggatgcatgaagcctggtgaatgtttgctgaatgggcggcggacaccttctaggggaggccagcttagtttccatgtcagcccaggaactttctgctggggctactgcttgtagttgtagtaactgtgccctgaacaaaggcaccagcaagaggggacagtggtggctgaagtcaagcctggaagaaggaggaagcgtcttttcctaattggctcaccctaaggacagccttttcccaattggtctgcccatagagggtcctttttccatttccctaactataaggcaccttttctaatcatacagaggtgctgtaagcccacccgcctgcccaccccaccagcggagatgctgggcttccttaaggcaaggcccacttggaggaaggaaatcccgttcagaaaataaaatattctgtaaataaccacctattaaaatgggatcagtggccaggcgcggtggctcacgtctgtaatcctagcactttgggaggccgaggcgggcagatcacgaggtcagatcgagaccatcctggcaaacatggtgaaacctggtctctactaaaaatacaaaaaattagctgggcgtggtggcgggcgcctatagtcccagttactcgggaggctgaggcaggagaatggcgtgaacccggcaggtggagcttgcagtgagccgagatggcaccactgcactccagcctgggcgacagagcgagactccgtctccaaaaaaaaaaaaaaaaatgggatcagtaagccaggggaggcggctcgtggctgtgatcccagcactttagggagacctaggcaggagggctgcttgaagccaggagttcagagaccagcctggacaacatagtgagaccctgtctcaaaaaaaaaaatcttttttaattgtggagacggggtctcactctgtcacctaggctggagtgtggtggtgcaatcatggctcaccatagcctcgacttccctagctcagcttcctctcacctcagcctcccaagtagctgggaccacaggtgtacaccaccatgcccagcttttttttttttttttttttttggagcgaaataaaaagagtctgaccttgttgcccacactggtctcgaactcttgagctcaagccatccaccgacctcgacctcccaaagtgctgagattacaggcgtgagccaccatgcctggacttaaaaaatttttttgaaaaagtatccagggccgggtgcagtgactcacgcctgtaatctcagcactttgggaggccgaaaagggcaaatcacctgaggtcaggagtttgagaccagcccggccaacatggtgaaaccccgtttctattaaaaatacaaaaattagcagggcgcagcggggcgtgcctgtagtcccagctacttgggaggctgaggcaaaagaatcgcttgagcccgtgaggcggaggttgcagtgagcagagatcacgccactgcactctagcctgagctacagagagagaccctgtctcaaaataaataaataaataaataaataaataaataaataaatacatgaaaaattattctggaccctttctcggggacagcaggactgccctgacctcctcccggcccgcaggtgtgaagacccccttgtggaagaaggaaacggaagagctccgggccgaggacgcggagcaagaggaagggaaggaggggtcggaggacgaggacgaggacaaccagaggccgctggaggacagcgcgacggagggcgaggagccgccgcgggtagcggaggagggcgaaggccgcgagcggcgctcagtgtcctactgcccgctgcgccaggagtccagcacccagcaggtggcgctgctgcggcgcgcggacagcggcttctggggctggctcggccccttagcgctgctgggcggcctaacagctcccaccgacaggtgcctgcgcgctcctcgaccggggcacgagggaggcggtgcccgggccccagggaggaggggctgccccaggcactgagcgcctggtccccgccggcaggaagcggagcctcccggaggagccgtgcgtgctggagatccggcgacgaccgccgcgccgcgggggctgtgcttgctgcgagctcctcttctgcaagaaatgcaggagtctgcacagccacccagcctatgtggcgcactgcgttctggatcacccggatctgggtaaggcgggggccgctgggaactcctgagcgcccccgctcccagcctttgtgccctccatcatttcctggccccagaccccctaccgaccttctctcttggagcgcggagccctcttcgacgcattccgcaggaccgccccttctcagctgctgcccagagcgcccccatccgtcaagaaggcccactgttggtgcttggttcccatctgtcacctagcgcccccagtgcagagcccagcataacctagagcccgctgtcaacagcgcccaccgagggctccccgcccccacgcagcaccagcgccaccgcacacctgactctgtccgctcacacagcctcaccttcacctcttgggtatttcagatccgctctggcccagtgggcagaggcatcgcctagagaaaataacctcagggttccctcatccctctgacaaacctgcctctttccctgaaaccattcaataaaacctctgatcaaagtgtcagtgctttgaggtggcgcaggtggctccgggtggggatgatcctcctggggttcaagccagaggtaaaagtgtgggcagggagcctcttccctctctaccccagaacggtacaaacatttgtatccaaaggcaaaggcccttctgcccactgcgcagaggagaaaatgaacgggcagggccaacaatggccctggggaggtgagggctgaacccttgccagaccattctcgcctgccctagacgccctggcttgctgaggtcagtgctgtgcatatgaggcactagcaggtgtggaggggtgggagaagcctggaaaaccagatgctaaaataaatgctggcatgggtggaggcagaagacagggaggctggggagctggttccttctccaggaatcccagctattcttggccagacagcaggagctttgggaatgcctcgtgtgtggcctggagaatgcggccactgtgagagcacaaggccaccctcagcctgcagggctgcctgttgtggaggctgcatccccagcgcctgcagcgttgcagagccccaggaaggccccttgacctctccctgctgcacatcattctccatctggcctggagctgcaaggacattttgctttttgaggagaggcaggccccttctctccatcacagctctgcacacacacacacagctgcctagccctggcttggatggaagagcatggccctggcctcccctgcacccatgcccacctgctctcacagcaaaggatggaagaactgctccaaggaaggctgcttcctgcctctcggcccaccagctgaaggcacctctttattccagccccagacaaaaagccagggactggtaggcctgcatcagtctccctcccactctgtgtcctgaccccacaaagggcctctgaggttggagacgcctgtgccttcatccccatccatgcttcctgggggtggggcctctgactaaatatgacaccgtttttcaagaactgagccagggggtcctgaggagaagggcacagtcttgcaaaatggtctcgaatttctctgctgagtttttcatccccctgcttggatcccagtgctgttacctcttgaaaggaactgtacctttagccgaagaaacaaaggcctggggaggatagaagtcctcggaggaaagggccaagggatctgggacccttttttgcttttcctaagattgatcccacccccacctccatgtggtggggacagacaaagacaatgctgcattcttcaaggaacaaaggcagacagacttccagatggaggctttgctgcccggtcttctgcagagggactcagaggcttctaagaggggttctgccccgggggtggggaacatgattttgccctgagagcaccaccagtttctgaggtgaggaggtgccttcagaacagggcgctccccgagttggcatgccagcagcccatccagggcagctcggtggcccagcggcccgaggtggttgcctgcagtttggcctggtcgaggcgccagtagcggtcatctcggaagaagatgatggagccatcgggcctcggcagggcgccgctgacctcctcagggatgcctccccagtcctgcagacttcgggggtagtagggctccacttgcagtccccctcgggccagcacgtagtagcgggcacccttgaagaggatgaggcggcgcagaggagggaagaagagggcggcgtcaggatggcggggcaggccccctgcccggcacagctgtgggagaccccacactggcttggggccccggaacctccagcatcgaccccctgtggggaattgggagagccagggtgagctggaggctgtcacccattggccctctaccccacttctgtcccccatacctctgctctcctttaagctggagcccacgatggttggtattcatatcaatcaaacggattgcactacaaattagttataaatagcagggtggtagtagcaactcctattatttattgtctagactcccagcaggtgtcagcagagggcagatagccccgaaaggaaggcccagagctttctccactgccatcattactaataattctatgagggcaaggatttttgtttcattcactgctgtatccctaacatatccaaccacgtctagtgcatacaaggcactcaatattggttgaatgaatgaacaaatgaatgaatactatttacctaagtattaacatgtatctagtaagatattgcacactcttcaggcaatattctcttttcacactccttccccagcaagtgtgaggtattgttttccccattcgagaaatgcacactccaaaagttaagcgacacgtccaaccccacacagctaggattccaaggaagatccagctttctgctcagttgcagaactccagagcagtcctctgcttccctctagactcctctctgaaactctccctgggactttgacacttgctgctccctaatccatccctgaaaggtatcttctgatagagtcttccctggggtcacaggttcagattggaatggagactccaccatggactcgtgtgagagtcttcccctcttttgtcctcttttgaccttgggcaggacaccttccctctctagggctcagttttccccgctgccccagagccagtacctttgaagaagtagaaatctccatcattcaatgacactgccgcagcctcaatgttggggggcagcccgacccatctttcctgcagtggacggggctctgagacgttgccatcagctgccacctcccagaaatggctccctttaaaaatgtacagttgctgttgcctgtctgcccagagacaagagagagttgaggagtgaccatcagcttcctgctgtctttccaggaaagatgctgtcctggaagccagtttcccaaatggacaagcatagggtatggtgtgtacagttggcgcagaggggaaagtgggcaggaagaagcggtgttttgctgggtgtggggttgctacctgcagcgtgcttgtggcttgggatttctggcttttacagtccatccccccaacttgtactgcagctctggagacactaagagatatggaaggagagaaagaagcaaagcaccagtgggaccttcttacctacagtgatggcatcgaaggaagagtggcagtatttagggccctgcgtttcagggcgccttccttgggggctgtaggagtcccaggtctcaaagtcagtgaacagctttcctgggagctggacggccactgagccccctaggggcttccctttgtgagtaaggaaataagagagagagagaacacacatagggtagagggtatgctgtgcactcaagaccttcccttggttactttcatgattatctaatatgaggggcaaggaaggagagtgggagtgggggttaagagttgttcctgggccaggaatggtggttcacacctgtaatcccagtactttgggagaccgaggcaggcagttcacttgaggttaggagtttgagaccagccttgccaatggtgaaaccctgtctgtactaaaaatacaaaaattaaccaggcatggtggtgcacacgtgtagtcccagctacttgggaggctgaggcaggagaaccgcttgaatccgagaggtggaggttgcagtgagctgagatcatgccactgcacgctagcctgggtgacagagcgagactccgtctcaaaaagaaaaaaaaaagagttgttcctggttgttggtgctaaccatcaaactaaactcaggaatcttcttctacccaacatcctgggacagaggaacctcctgagataaaattggagtggggtatcaagcaagggaactaagcgggtcagggagtcctcttctctgattcctgggcaacacaggtgtcatgagggcagagtccagagacccaggctgtgataactacagcaattataataattacatcactatccttcacttatgagaggagggaagcagagtccaacaagcttattatttggtaccatcacctgaatcccagtctgcaatttcctagctgcatgaccctgagcaagttacctaacctctctgagccccattatcttgatctgtggacaaaaagatgcatacttcatgggtgtgttgcatgtcaagtgcctggcccacagtaggtactcatgaaatagtagctgttagtattacagggtataagtttctcaggctacaaagcatgctcatacccagtagcacaacagccctgtcaggtaagcaggacctcagttgttatctcttttcacagaaggtaaaactgagggttcacagagggaaaatgcccaagagcatctgctaatcagggatggaaggtgacttgaacccaggcctcctggctctgcccatggcactctgagggagacagccctgggctgagatagatcccagggcagtagcactggcccaccctggggaagaagacctggtctgagcccaccaccaggcagaggtgggcaggctttggggatagggggcatcagcatcgtggtgagagaaaggctcggggagagctagtggctggggcaggaatgaaggctttggggtccgggatgggggaagaggtgggcccaaggattgggtatgggtgatggggcgggcacatggtgtgagcgggagctgcgggggctgggggttgggcagaaatccagtaagtggaacgcaaggggcggggttgggggtactgtgcacaggaattagttgggactgatggagagatgagggccatggactcgggggagcaagaatccgaggtttttcagatttgaggaggggcatagggctttagaattgggacgaatcggcgacagggaggccagatctatgagcttaggatgggaaatcctatttgcagagccggcgttcaaggacaggaggccttgggggcaggagtgggaccaagagcggggcatgtcccggggcctcaccatacaggctctgcacggccagcacgtcgtcccagctgagcagcgcgtcgcggcccagcctcttgtagtagggcgccatgagcgcgcgcggcgcgggcgagtgggtgaggccaagcgtgtgaccgatctcgtgcgccagcaccacgaacaggttgcgcccgcggcggcggctcagggaccagcgctcatcttggtcgaagtgcgcttcgccgcggcggggcaggaaggcgtgcgccagggcgccccctgcaggtggggcagaaggtcagggggtgccacggcccacgacgcccccaggtactcgcggcccagcgcaaatgccactggggtgtgtgtggctgttctctgctgtatagtttccctcctaaaatctggcagaacctgaagtgtgcagaggtgaacagtaggctctgcactacttcaggtgagtagtgcagtggacgatgagtaggctgtggacgcctaagaggcactgtggtgtagatatggcatgggcccaccaatttgggtgccattcctacttttacaatctactagctgtatgaccttcagcatttagcttaacctctctatgtcttaacttcctgatctgcaaatgggaatgatgatggtgagcttcttcctcacagagttgttctgaataataaatgtgtgtgtgtgtgtgtgtgtgtgtgtgtgtacatgtgtattacaaatgatgcagcagggtgtggtagctcacgcctataatctcagcactttgggaggctgatgtgggaggaacatttgagcccaggagttcgagaccagcctggggaaacaaagcaagacctcatctccactaaaaaacaaaaacattagctaggcgtgatggtgtgcacctgtagccccagctacttgggaagctgaggtgggaggctctcttgagtcccaggaggtcaaggctgcggtgagctgtgattgcgccactacactccagcctgggtgacagagtaagaccctgtctcaaacaacaacaacaacaaccacgaaacaacaacaacaaaaaagtgatccttggaacagtgcctagcacgtaataagggccacttaagaattactttcaggctgggtgcggtggctcacgcctgtaatcccagcactttgggaggccgaggcgggtggatcacgaggtcaagagattgagaccatcctggctaacacggtgaaaccctgtctctactaaaaatgcaaaaagtagccaggcgtggtggcgggtgtctgtagtcccagctactcgggaggctgaggcaggagaatggtgtgaacccgggaagcagagcttgcagtgagctgagatcacgccattgcactccagcctgggtgacaaagcgagactctgtctcaaaaaaaaaaaaaaaaaaaaagaattactttcaaaaagatctaggagtaggtagagtatagttacccctaaaaggaggcatgatgggaccttctgtttcttgatttgggtgctgggagcattcagtgtatgaaagttcatcaggctaaacttgagatggttcacttctatatgtatgtgtattttatttaataaaaagtataatttttatttttattattttatatatacttttgttaaagaaaatatacatacatatagaagtgaatatatatatatatatatatatatatatatatatatatatatatatatatatatatataaaattgtgttcttgccctcctctgccagggcacctctggggggcctctctctacttctaataggaatgagcagaggtagttgggctggatcagtgattttcaagcttttagtgtgccccagatggagcttattagatgtgcaggtgccagggtaccacccctaacaattccccttccacagcggcaggtgaccctgacacaggagtcagaaaactgcactatgataaagtttgcctagaagcttgtcgagggtccctccagctttgccttcttggaccccaggccaactgtgactggcaaagatgggggtgctagactaaaaggagatcctcctgggggcatggaaagtcagccgcatgtaggaggaatacatgcctattttgaatatgtctccagctgtttcaagcattgttcactctattcaactctcactgggagacggatgggcaggtttgggagagaagaccactattcaaaaagacaaagtatctgtcccaaatcagagggctgcttggggatcctgatgtccttactcccagtgcagtgctgtcttaactaggtatggatagaaccatgtcaggtagatcacatggatgaagtcagttacaaataagtgcatgtgtgcactacatgtggattcttgcaaagcctagattcctcctggtcctaacccaggtctcagcagtagggcctggatgtgggctttgctgtaggtgggcttgactgaaagcaggagggtgcgagggaggtgggggctcaagttcccaggccatacaagggcttaagtccccagcttgaaggggtctgattaggtttcctttcttcattaggaggggaaatgtgcaaacagcctatattcaggttctgaaggctagcgttaggcagaaggggaaaagagcggtttaaactgcagccagagtcttcaggttggggacaaacagaactatctgtggcgtaggtatatgaagcacttccctgtcagggctgtcgggagtagggtgcctcttgccctgtggcagcggctctggtagttgggggtgggggagcagtggtgggcagtggatgttttttagggctctggagtgaacatccactctggagaacaagagaagcacaggcctgtctagaggcagaggatggatgatggaacctcgggagattctcccagaatgcataatactcttgagaatttgcaaagcacttcccttgcagagcttcatctgactgtcccttcagacatgtgacacataatagggcagggaccactgttcccattttaggatgaggagactgagggttctctgcagggagatgtgcctcagccaaggccacagggagggtgaatgcttcattgccacccccaaactgcttctccaagttgggttcccctcctgctgtgcgggagggaggctttgtgccagcacctgggccatcaaaggcattgcccagcccatcgttgtggtccccttggaagaaggtgagccggatgtcagcggggcctgtggctggggcctcccagaactccagcgctgagacgttgctccacaactggaaggcggcgcgcacggcgccccgaactgccggctccggcagatgctcaggccagttcaccaggcggtaggagaggtgctgcttgtaccatttgttacctgccacccagaaagcccacgtcagtcacacctgctgcagagcccgagtctggtccccacagacccagtaggatggcgaggggtaggccctcccccagcagcccctcgtctgacggggaagacacagtttttgccctgggcagctccccctttgactggggcgatactgcctggctgagggcagccctcagactgagaggactccccttaccctggacagtccccagtacagtggcttggactgtggaggtcccagtgtgttggaggggaagcagcctctgcccaggagaagcccccaatctgaagaagtctgtctgaacccttggtctagggtcttattcttccccacagcctgggctgagtctgaaaacagttctgtgtctgttgctaccagcaaatcccagcccctccctgcagtgtcagagtggaggagaggtggggccacagaggccacagctgtgactccccctgccccccaccatctctcttcaggcctcacaccctcctgccacctctagacacttcactctgccctttccagggcctggggcctatggccagccaacaaccacaagactcattcatttgagtttctttcctgcccctctcctcctcgcttcctcagggactctggagagctctgaggtgaaaacaaataagaacaaagcgtgtgttttgtcactgactgagagaaagttttccatctctgctttgttaagggtttctctccctttgccccaaattgcaactcctccctgagggctgagactctggcctcttaccccagcccccgtcaactgagtctgggcccaactgcagctcagcgtgcacccggcagcagcatggccggaagggccagatcccgagtttcttgtgggctatttctgagccctgcaaactcaggggctgggattgtaacctcaagtggaagactcgcggcttggaggcaggactcttgggccaaggatgtggtaactgagacctgagaccccaggacaaggggcctgcccagggtcccggaatgagtaagtagctgaggcaggccctgacacctaatccagggctcttccattattccacatagacaggcaggcacatttgccaggacgccaggcttataaatctgcccaaacatcattcctgccggtcaaagcatgaactaagattctccagatgtaagggagggtcttggagagcagaggagctggactctcttctcctcaccaatgcaagtgggggaggggtacatcccttctcccacccctgagccaagctccattcaaggcaatgccgcctccctgggcctgtttggcctggcagccacccaacctctgcctcccagccagtgaccaacccttaacgaggagagagggaatgactctaaggaagggagggagacaaagaaggcagagggaagacctggggtccagaggtgcggctgagggtttgtgatgtaccagtcatgcttctgctgggcacactgtgagtcttcaatgggcgctgggctctttcacgcccttgctgtgggggacggtctcccaggctctttctttcccctcacaaacctctaatccattagcatagtgtgagatggctccttctgcctctttgcagctagtggggtccctcacttcacaggcagaagagggggtggcgggcagttttctcattctaggccgccagtgaaggtgacaggtctcagaataaaatcctgtaggaaactctgagtatgtgcatgtgtgtgtttgggggaagaatagggaggatgaataggaatgggaattgagagaaaacgactgttttcctgagaggaccaggggagggggtgtcgctggtgtgcctgccaggaagaaaggacctggctgggggccagcagtctgagcccttgcccctgtctccctccagatttgctcccatggagaaagctagccgcttcaggccctgacccaaactcctggccagggagggctggtttttgtggtgacccccaggccctagcagcacctggcattgtactccctgacacccttgctccaaagttcaaaaaggaagggggaaggaaaaagtatgggaagggggaggagaactaaaagctttgcctgggcagaaccctggagttccgactcccagcagggaactgacactgtggaaagaacatgggttagaatcccagtacctctacttgcaaacttacataacaaattatggaatctctccaagcctgtttccctatgtgcaaaatggggttgataagacttttcccatggtaagatgtgaggcttaaatgagacagcaatgtggagctgctgggcgtgtagtgcatactcaataaatatacattcccctcttccttccttttccaccccggatacaccctggtgcccccaacctccgccagcttagtgaaggaacaggaagcctgcaggcaggcaggaggagcaggtacctgcaatgaggttgccagataagtttcttttttctttttttgagacggagtcttgctctgtcacccaggctggagtgcagtggtgccatccgggctcactgcaagctctgcctccccgggttcacaccattctcctgcctcagcctcccaagtagctgggactacaggcaccccccaccacgcctggctaattttttgtacttttagtagagatggggtttcaccgtgttagccaggatggtctcgatctcctgacctcatgatctgcccgcctcgtcctcccaaagtgctgggattacaggtgtgagccaccgcgcccaggctttttcttttttttttgagacagagtctcactctgtcacccaggctagagtgcagtggcgcgattttggctcactgcaacctctacctcccgggttcaaggaattctcctgcctcagtctcccgagtatctgggattacaggtgcgtgccaccacaccaggctaattactttttgtatttttagtagagacggggttttatcatgttggccaggctggtctcaaactcctgacctcaggtgatcctcccgcctcagcctcccaaatcgctgggattaaagatgtgagccactgtgcccagctgccagataagtttctttttttaactttaaaaaactatctgttgttcatctgaaattcaaatttaactgggcatcctatattttatgtggcaactgagtaatactatcctctatcaaaaagagatgctctggctgggcacggtggcttgcgcctgtaatcccagcactttgagaggccgaggtgggcgatcacctaaggtcaggagcttgagaccagcccggacaacatggtgaaacccgtttctactaaaaatacaaaaaaaaattaccctggcatggtggcgtgcacctgtaatcctagctattcaggaggctggggcagaagaattgcttgaacccaagaggtggaggttgcagtcacctgagattgcgccattgcactccagcatgagtgacagagcaaggctccatctcaaaaaaaaaagaaagagagagagagagatgctcgaaattgtatagtgacagatgaactctattagatccttcctttggggcatgagaaggtgagatacagccagaaggaagcagccccggagctcaggtcaaagtacagctgctgaactgtttctggggctgccccactttccactgcattctcacaacaagccccttccacctggtaatcaaggaccatctctcctttgcaacctggaagggcctatgtctcggatgaaggaacggagcctcagtgagaaaagtgacctggcccaggccacacagctgagacttgaacccagggcctctggctccagggatgctgctctctgttctaccagtgcctcttgaactcgtagctctctgctcttctacttcactcttcctctccattgcccagaaacacggtgggacacagaacatgttgacaccaagggcatcctgactccggagccggaccccattgctgactccttgctttaccaggaaagcaagcagtcagtactgaggacccagagtggctgggcatataggtgaagcagaattggtttggcaaacacctggaaacagccaccctccaacagtgaaggggaactgcccacaatttccttacaggttagctaagaaatgagaacaaactatgtgccttctgtcctgttcctaatgaatactatcagtaaaagtagtcaacacaaattaaaagtggcaatggcccaaagtgttcacagtaaaattaatgatagatgaaaacctggttaaaaacccccatcttgttagaaatcttgaaagctgcaaaaattgagcagagaaaattagacttagttaaaacaatcaggttgttaatattatgcacggtaggccaggtgcggtggctcacgcctacaatcccagccctttgggaggccaaggcgggttcgagaccagcctggccaacatggcaaaaccctgtctctactaaaaatacagaaattagctgggcgtggtggcatgtgcctgtagtcccagctacttgtgaggctgaggcaggagaatcgcttgaacccaggaggcggaggttgcagtgagctgagattgcgccactgactccagcctgtgtgatggaacaagactctgtctttaaaaaaaattatgcatagtgaaacttgttatttgtgaaaaactgacaaaagaatcaaatcttcataaatcttagatctgtaccatttaacccctggaatattaaatttggctaaaagaaggaggagaagaaaagaaagaaacaaaataaagttacaagaggaaaatcatgacagcagaaactgtaatgtgtaaactgtgctatgatgaaatgttcagaagaggcaaatccattgagacagaagtggattagcggttgccagaggctaggggagggggagaagggggaatgactgctaatgggcatggggtttcttttcagggtgatgaaatgttctggaattagattgtggtaatggttgcacaattccgcaaatatcctaaaaaccactgaattgtacactttaaatgggtaaattgtatgggatgtgaactacatctcaataaagtggttaaaaatatgctatggacaaagtaaatcaatagatcacacatttgtttaataacttatgaaaaagaatgaattctgatgaaaataacttcagtaaatataaatgaaaaatgttagcaacagtttatctgccctgcattgaaaatttatcaaggaattacatgggttttgtgtttgatctggaaaaacacttgtacaatgaaaattcatcaatgtaggtgtcattctgaattaaatgtctgtattcacaatcatggtcctcaagccaagaggtcctattcacccactcctcccgtgccctagggaagagaggttactgacaaagtccagtcccaggctcagctgttttcctagccattggcttcaagacattgggaaatcttggcctagccggattttaacagtgctcaccttgctttgcaaagcgtttcttacgcctcattttggtccggtgtctagcaaacaagtcactgatcctctcagcccaggccgcataactgttggtatctgtaaccccgcagcggggacgagtcatctggcgcagggtggcgcggtccaacacgccgctgacaggtagctgggacacccactgaaacgctctgtcaggaggaaaggaccgcaaggggagggtgagtggtaagggtgagggcagggaagtctgcctccctggggtgtagccagccaggcttccaggaggagggaggaaatggtcagagcttggcatcctagcacccctaccccaagtcctccacatccctccaccctacctgatggcatcgctgaatcgagtggaggtgggagctttggggacctgttcattgaggtatccgtacttctctaggaatgcctgcgggagagaggaatatctgctttttccatagcatcctttcccctcccttggtccccaagggcccagggcacatacatcctgcccagtctcacctcttgtcttttgcccaagagggtctataagctatagcagaatgagttctgggattaaagtcaaaaggacctggactcaattccaggtcaccactgactagctgatgatctcaggcaagtcactcaatatttctgaacctttgcttccttatgcctaaaactgggccagtagtacctacccatatcttacggcatcagtaggaatctagcagcacatgctaggcagtacagtaacaggctctggagtcagatccacctaggtttgaattccaactagtaagatacttctctaaaccacagttttctcaactgtaaagtgggcttaatactagtacttaccttacaggggtttttttgtgtgtgtgaggactaatcgcaagagtgtttataaagcacttagcacagtgcctattacataggagggactccatacagagtggctattataatatgtgttatgcgttacgtgcatatacactattcatatgcatcctgaaacaactacattctctagaatatcttttggtattgattaggagcttatcaggtgctagctctgccatggctgggttgtgaattgtctaattctggatttttaaaaaaacagttatcttccccaccgatgtagatatatttatttatttatttattttatttatttttttctgagatggagttttgctcttgttgcccaggctggagtgcaatggtacaatctcagctcactgcaacctccgcctcctgggttcaagcaattctcctgcctcagccttccaagtagctgggattacaggcatgcaccaccacgcctgggtaatttcttgtatttagtagagatggggtttcaccatgttggctaggctagtcttgaactcctgacctcaggcggtccacccacctcagcctcccaaagtgctgggattacaggcgtaagccaccgtgcccagcccaaatgtagctatattaaaggtcctagaacaacaaatgcacttaccactaaccttataattgatataaaaacttgactctctaaaagatgtattttttgaattagaaagcttcttttattcattcgttaattaatgcaatgtactaggtaccctgctaggtacaataaaaaataagacatccctaaaccaggcacagtggctcacgcctgtaatcccagcaccttgagaggccgaggtgggcacatcacctgaggtcaggagttcgagaccagcctggccaacatggcgaaacctcatctctactaaaaacacaaaaattagctgggcgtggtggtgggtacctgttgtcccaactactctggaggctgaggcatgagaatcacttgaacctgggaggcagaggttgtagtgagccgagatcacgcagctgcactccagcctgggcgacagagcaagaccctgtctcgaaaagaaaaaaaaaaaaaagtaaataaaggacataaattggtactatgaagaaaagaaaccaagtgatatgactgagaataatttaaagaaacttcacatcggaaggtcaggaaggagttgagtctctgaggagctgatacgtaatctgagtcctaaagaatgagaagcttgccatgcaatgaggtgggaaagggtgttccagacagaggaaacagcaaatccaaaagccctaggctaagaatgacagtgacatgtttaaggaacagaaggaaggctggagcacagcaagtgtgaagaaacagagcgtgagatgaagtcagagagagaggcagggctgtcagccaggataagaagtgtaggtttgttttagtcctgctgatggattaattggtggggaatgaaagacagaaatccaggatgctcctaagtttttggcttggaaggtgatgctatttaatgtatgaggaagcctgcaggaggtacagatgggggtgcgtgggtttaagattaccttggagatttcaaagtggcactggctgtatgatcctagagctcaaagcagcagcctgaatatttcagcatgtaggtgatataaagctgtggaccaggacgagctcctctggggaaattggtataattgagaacatctcagggtccaggtacctttgactctgcctaccctaacacacctggaagctgttctctcagtaatcaagttatttgaggccagtggagagaaaagtgtgactattattctcacctatcaccagttctaccctttgggcagacgatgcacttggctccctgattgcccttctcactgataaagttacataaatgtcaccttggataaaaaagaatgttgcctcagctgcataattcttctacaaggagaattcttctacctacatagcctcaatttttacccctccttgttgtgttacctatacagaaataattttctgtcttcttctcttacccctattttctttgctgtatttcttttttcttttcttttccttttttatgttttatgttttagagatgggggtctcactatgttgccctggctggagtgcagtggctattcactggcatgatcattgctcaccacagcctcaaactcctggactcaggtgaccctcctatagcctcttgaatagctaggactacaggtgctgcatgccaccttgcctaccatgttgtatttctctcttttttttttttttttttgagacagagtctcgctctgtcgcccaggctggtgtacagtggcgtgatcttggctcactgcaagcttcatctcctgggttcatgccactctcctgcctcagcctcccgagtaactgggactacaggtgcccaccaccacacccagctaattttgtttttgtatttttagtacagacggggtttcaccatgttagccaggatggtctcaatctcctgacctcatgatccgcccgcctcagcctaccaaagtgctgggattacaggcgtgagccaccgcgcccagccaccatgctgtatttcttaactcaaaataattccaatcatagctgctgtctcaaggaaaatgcacaagttgggaatgaagctagatactaagaccagcaaacccctaaatctttgcaagtatccagcttccccttgtggatttaattcacattcattttcagcaacctccacatcctcttctcaataaagtaacttttcatagactcctcattctacgtaactttcctagtccatttcattgtttttctgcattaattcattagtatttcagaactattgtttccttttttccctttgcaaatgtacactatttttggatgcataatggattgaaagtgttctggtggcttaatttgggaagctatttcctgctcaaaatcgtgtggcatcacggtatagccaccaggtttgggaatgaaaatctattcccaaccctgactctgccagatggctggggacaaattatttttttttttaatttttattttttgagacggagtctcgctctgtcacccaggctggagtgcagtggcgccatctcagctcactgcaagctctgcctccagggttcacgccattctcctgcctcagcctcccgagtagctgggactacaggcacctgccacgatgcccggctaattttttgtatttttagtagagacagggtttcaccgtgttacccaggatggtcttgatctcctgaccttgtgatccccccgcctcagcctcccaaagtgctgggactacaggcgtgagccaccacatccagccagctggggacaaattatttaatctctctaagcccctctttctttatccacaaagtgagaataagttcaatttattcttgatcttattcagcgttctcagaaggactaaataaaagaatgcacatttagcatagtgcctggtacaaagtaaatactcaataaacaattgatctggttgatttaccttagagggaacgttaacaacagacttttggaatgcaatccatctgtaaaaagggaactgctttgaacatggcagttacacctctgttctcaattcaggtgcttctgtctcagacttgcctgacctcagctggatgcctggttctcttccttgtcccctccctttcctttggggaggatggacagaggactttctaaaggtagccagggaattaatgtctccttagaggcagttttgctaggtgagtgacttgggagagaccaggtcacaggtcggcatggctggcactcccttgtgcctctctccacaaacacacccagcccttatcagggagttggctccggttctggaactctgaagccttggacagagtgggagggaggggaaattaactggcagcgtctcttgtttcctggctgggctgctgtgcctagtactctggcaggcaagacggggtggagggcaggatgggggttgggggtgagggcctttttcaggggtccctcagaggggaagtcctgggcctttcttcctaactcgcctctgggaccctgtaggtagcaaggcagagttaaaatctcagtaagcagaatgagcatgtgcccgggacacgagccaagcagagccactgaaagaatgagaaaaagaaattttaagaatttgacattttgtatttctataaaagcactgaagtggctgtgcgtagtcatgcctgtaataccagcactttgggaggccgaggcaggtggatcacttgagggcaggagttcaaggccagcctggctaacacggtgaaaccccgtctctactaaaaacacaaaaaattagctaggcatggtggccagtgcctgtaatctcagctactcgggaggctgaggcaggagaatcgctggaacccgggaggtggaggttgcagtgagcccagatcacaacactgcactccagcctgggcaacaagagcaagactccatttccaaaaaaaaaaaaagcactgaagtattataacagggattatcaggatttatgggctcccttatacttttatgcttaacatgtgtatattcaaaaaaatttaaaacacatacaggaaggggctccttaatgctgtcagggctgggtgctctcacattctgtggagtggaggcagatccaacttcccgggtgaggaggtggtggggttgaaactccctctgctcctggaggtgtccctaaccctcttctgtgaggcatttttcatgcctcagtttcctcctgcaaaggtaagagaaatggtctactctgcacagtagaaggagcaggggtgtggggtcagggtggaggagtggcagcatgacaaagggatcccaggagaagacacaaaactgggaggtggagctccagttcttaccccagcttgaccacaaaccctcttgggggccattttccttctaggcttccattgtcctgggggcttgttcaatggttctcttaaggactctctgagttctacctggcaccattcctgccccacttcaaggaggcagagtctagaccactcctcctggccttgaagttcaaggaccaggttttctctcttctctattttccacccgtcctctctcttagggagcccaaggcttgagctgaatggagaggaagctggaaggctgtgccccttaggtgactcaccctactctggcctaaaagcttgtgccaacatgccttacccccttggttagggctgggaccactttcctggggagtcacttctgaaagtccctgggagtggctgtggagtctgggtaaaatggaactagttctcctgggacccagccagcttggtggaatcacacagtgctagggattctaggcctgcatcagtcctgacttgtcctgggagggtgcatatagcctagcctatttagtgcctgagggaagggaaattttggccatttctgcgcagggcaggaccagtgatgaggtgcagcaaaatgaacccaaggcctgagtcaggaagtctgcatcattgaactggcagggcaagggcactggactgagagtcttgagttttattcctggtactatggctaacttgtatgtccttaggtaagtcctgtgcctctctgagcttcagtttcctcttctataaaattaggaggttggattattattattattgagacagagtctcactctgtcacccaggctggagtgcagtggcgagatctcagttcactacaagctccgcctcccgagttcacaccattctcctgcctcaacctcccgagtagctgggactacaggcgcccaccaccatgcccggctaattttttgcatttttagtagagatggggtttcaccgtttcaggcagcatggtctcgatctcttgacctcgtgatccgcccacctcggcctcccaaagtgctgggattacaggcttgagccaccgcgcccagccaggagattagattattagagctctaatatatattccagctctatccgttattctatccctgcttctgcaactgactagctgtgtaagctaagacaaagttacttaacctttctgtgccccaatgtataaaatgggagaaagaatactgttttacctttctcgcaggagcatcatcaacatctaagaagatggtctgggaaagctttatgacagttgccccattaacaatgttatttttacctctatgttcatggagctttattgctggaagggacatttggtaggtgagcgtgtagtactcaccttcttgttttttttttttttttgacacggagtttcgcttcttgttgcccaagctggagtgcaatggcacgatctcagctcactgcaacctctgcctcctgggttcaagtgattctcttgcctcagcctctcgagtagctgggattacaggcgtgcgccactacgcctgggtaattttttgtatttttagtagaaacggggtttcaccatgttagccaggctggtctcaaactcctgacctcaggtgatctgcccaccttggcctcccaaagtgctgagattacaggcgtgagccaccatgcccagccaggactcaccttcttagacatcctccatatcacagaatttcagcagcagaaatgaaattaagaatttaaaaattgccaaatgcatgcagaaactgtcactttacctatgatatactccatctcatgttacattttattattattttagttcccatagtgactatttgagattgtgcttatcattcaagtgtatctttggcattattagccaagtcaagatgcaaaggatggcaaggcatagtggctcacgtctgcaatcctagcactttggaaggctggggcaggaagatttcttgaggccaggatttcgagaccagcctcatagtgagatcctgtctctacaaaaaaaaaaaaaaaagatgaatgatagctggtattctgccttgatgtgttctacatatgaaaatattttctggtagtcaggagcacaataagcccaggcaactgtagagctttttaaagatatcacaccttctttgaatctcacaatgatcttgcaagaatatagacaggacaggtgttgctattcccattttaaagatgaggaaattaagtctcaggggagtgtagtgtcttaccaaagtgatctagtgtgtgacagaaccagtactctaatctgatcctctgacatctaccctaggatgttttattttacatttaaacaagtgactcagaggctttaaaactaaaggggcaagggccaagctgctctctctactggggagctgactctcaattaagaaaaaggtcaaactggggtgtttctggctggatttctcttatctgctttacaagaaagttcagggttagagcagaggaaagaagttgctcaggcagtgggctctggctttcaaataggggctgggatcctgttttccatcacagccagaacaggtcgtctaacaggccagaggcattcgacaggactgaagcatgttcctgcgtaaagataaacatctgctaccagaatgctctgctttcaccctctggctcctgggagctagtgaagacttcagggcagtggggttaactcagctcctttcctttattttgggtaaaggcttccccttccctctgcctgactccctttctttttctccttctttcttttgtccttcagttttttgtttgtttgtttgtttgtttgtttttagtcagagtcttgttctgttgcccaggctggagtgcagtggcatgacttcagctcactgcaatctccgcctcctgggcacaagcgattctcctgcctcagtctcccgactatctgggattacaggcgtacacaccatgcccggctaatttcgtatttttagtaaagatggggctttgccatgctggccaggctggtctcaaactcctgacctcaagtgatccacctaacttggcctcccaaagtgctgggattacaggtgtgagccactgcacccagcccctttgtccttagtcttatagtcacaaagttctgtctaggtgtaacctagatacctcttgctataatccctgctccttctttctctctctctcactctttttttctttcccttttttttttttttttttttttttgagatacggtcttgctcgtcgccctggctgaaatgcagtggcatgatcacagctcactacaaaccttgacttcctgggctcaagtgatccttgtacctcagcctcctgagtagctcggactacaggcatgtgccatcgtgcctggctaattttttaatttttgtagagatgggggtctctctatgttgcccagactggtctcaaactcctggcctcaaatgatccttctaccttggcctcccaaagtgctgggattacagccatcatgagccattgtggccagccctcctttcattttctgcccttaaggaagatggaaaacactagccagttagtctttatccagaccacatcttgtactctttctctaatgccaaataactataccgtatggactcatggttctcactagacttgtgggactaagtttagggcacaaaataatgccttgatcaagggtgggtttagggagatattgtccaaccatgtctccctgctattagggtcatgcttccactacccaaatcctggtaattggctagacaagtgcttttccaccaactgtggtcctctaggacccttcagagcctcttctgcacttctattcaccctatacccatgagtcactgagctaagttcttgggaacggcttccacacccaggcttctgggtttctgactcacaaaaagtcaaacgaatggctctggggtatgagaaacagacactgcatctgggggtggatactccacagaagctccagtgtctccctggagaaacaaactatccagctcctggtactggcacactgggagtagctatacagatatagctagaccacccagtggaaggcaggtcctgaaactcctgcctggctgttctaaagaaggtccaagcaaagcaaatgatagatagagcccttgggaatctgtgttacccaagcacaggacagtgtctggcttggaatgggagtgggggacagggtgatgatgtcatctgttaattctcaatcttgcaactcagcagagcatgctcttcctacttactagtgctgtgagcagctctagttttcctaagttgcccactgaacttgttcctaagttgcaacaatgaacttgtttgttcacaacacagctttgtaagcacttaatctcctccctggcaaagcccactctggaaaggcctcaactttgttacattgtgtgcacagaggggacacagagccatgtacacagggtacaggaatacacacagagacttgagaacacaggcacatccagacagacagacatggacacagaggaagatgatgtatatacacacacaggcacacacatatatagaggcacaagcatacaagcacaccaaagccaaacagtgttagagctagagagaatcttagaagtcatttaagaaatttagccctcttattttacaggagaggaaaccgcagccaagtgaaggaactctatgatcacacagttgttttttattatttctttctttcctgtgccgttttggtttaatttgttctttcttcagattcttaaagtggaagcttaaatcattgacctaaaacttttcttctttcttactataggaatttaaagctgtgaatttcatttaaagcactactttagctgcatcccacaaatattgatatgaaatgttgtattttcattattatttagtttcattgctctgatgatttctgaatcaactcatgggtaatttaggagtgtgttgtttaatttccaaatatctggggctctgctagatgtcttattgttactgattttaaaattagttctgttttggtaagaaaacataatttgcaacatttaatttttttttttttttttaagacggagtctcgctctgctcaagctggagtgcagtggcgcgatctcggctcactgcaacctccgcctcctggtttcaagcaattctcctgtctctgcctcctgagtagctggaattacaggcacacaccaccatgcctggctaatttttgtatttttagtagagacggggtttcacaatgttggccaggctagtctcgaattcctgatctcaggtgatccacctgcctcagcctcccaaagtgctgggattacaagcatgagccaccgcacctggcttttttttttttttttttttttttgagacagagtctcgctctgttgcccaggctgaagtgcaactgcgtgatctcggctcactgcaacctccgcctcctgggttcaagcaattctgcctcagcctcctgactagctgagattacaggcgtttgccactacacctggctaatttttactattttcagtagagatgaggtttcaccatgttggtcaggctggtctccaactcttgacctcaaatgatcctcctgccttggcctcccaaagtgctgggattacaggcatgagccatcacacccaggcttttgcaaaatttaaattttttaaatgaactgagacttattttatggcccagcctatggtctcagttggtaaattattgatatgcacctgaaaagaatgtgtatctggagttctcaagtgtagttttctatcaacatcaattaggtcaagaaggtttacagtattgttcaagtctgctacatcctgactgattttttttgtctattttttctattcattattgggagagtggtgttaaagtttccaactatccagttccaaaaggccacatataatatgatcccatttatatgaaatgtccaggatatccaaatatatatacacagaaattagtctgtagaggctgagtatggtggttcaagtctgtaatcccagcaatttgggagcccaaggcaggcagatcatttgaggtcaggagttcgaaaccagcctggccaacatagtgaaacctccatctctcacttcccacttgacacatcccatttcccacttcacactgacattccaattcacaaatgtattaatgttttttttttttttaaatgtgtagagacagggtctctctatgttgcccaggctgctctcaaactcctcggctcaagcaatcctccagccccggcctcccaaagtgctgggattacaggtatgagtcactgtgcccagccacaaatgtactaatcttacaatagtagaattccatttacctgcccccgcttgccttgtgccattgtcataactgctacttttacatgtgttttaaagtccaacttatggccataagggggcatggccattaagttggactttaaaacacatgtaaaagaagtagttatgacagtggcacagcacctggccaagggaagcaggggtgggcaaataaaattctactattgtagaatagtagaattccagccttaatcccagcactttggaaggccgaggcaggaggattgcttaagtccaggggtttgagaccagcctgggcaacatggggagacctcatctctacaaaaatattttagaattagttgggcatggtggtgcgtgtctgtagttccaggtactcaggaggctgaagcaggaggatcacttgagcccaggagattgaggccgcagtgagccatggctgtctcaaaaaataaaaataaagtccaatttatgatgttattattttgctttaagcagccagttgtcttttacagaaattatgacaagggaaataagtgttttatgtttactcatttccaagctttgttagagtaggtcttactctagttcatggtgcttacacctaaagcatggcattgctggtgttttacatagatgcccagggtgttaaagagttttttccattttggctggcccagactgccaatatcttccagaactgctcaacttctccagtcttttttcctgttctcaatcacatagcagctgttctctggtaagcatcacacagtctcaccctacacgtgctagcacagtccccagggaaggacttgcagtgaaccccatacagacttatgggaacccccttcagtatagctccctcctctgtgacgcacccctccacagattccagctacttcaacagccctgaacgctgagctttgtcactcagcacagcaggactgctgtgttctgcttgaggtctagttccccgcactgcagtcaggaattgtctccaagcaaagaactggggcaactgtggggctcactttctgggttttccttctgtggatggttgttccctaaacgacacaacagtatctcccattcccacgttcttctcacgatgtgactttaacactcctctcagcaatcgtggggtctatgttccctccccttgaacctgggaggcagctgtgactgctctagccaatggagtgcagtagaagcaatagtaggtcataaaaaggatatagttcctctctcttctccccgctcccaacactcatccccaggacccagacaccatgttataaggaagcccaaactagcccacacggacagaccatgtggataggtccatgtgaaaaataactgaggccaccagccaacagccagcatcgactgccaaatatctaaacacacttcagatgatgccagccccagacactgtagaatggagacaagctgcactgatgtgccctatttgaaatttcgactcacagttatctgtgaacttaataaatggttgttttacttcactaagttttgggggtaatttgtaatgtagtcatagtaactaaaatactctctttaggaattgcagctctgtgctgtctgttgtccaatgctgaaaatagttgccttacatattttgtcctgtattattgttgtgggggagctagtcttcaaacccagactttaagccgaagctcagttctctaaagtaatgataaaggtaataacaacactgagagcaacttccttttatagactgctttctatgtcctatgagctgtgttaggcattgtacatatgttatttcaatgaaaccatacaacaatcttgtgaaataggcattattaacccccattgtatggagaagaaaactgaggtttatagaggttaaatgagttatccatggtttacgtatgggtttgtctggcactgaagctcatgcaattaaccacatacaaaaacacatatagacatagacacatccccagttgtgtgtgtatatatgtaatatatgtatatatacacacacacgtgtgcttgcataggcatatagagacacgtacacacccattacacatttccagagtttttatgcttttaaaatattttcttgttctcagagttaaaaatccccttccccaaatttatgttaaatagactgaaagaaactcaatctgctggatattaagtttcccaagcataccccaagatgaaattctctccatctggggccaccacaggcatgggcagcagagatatgcctctgttcccttgcgagggattgcctgggacccgcacttgcagggaggtggggtgggactcttaacaagacttggcttggcagacagaagccttctcctggggctgcaaagactctgtacttgatgttgtaagagtctcaattcagagaaacaaagtgcttctctgaatatgcagagaaaccagagagcacagagcaagagcccagtgctaggaaggggaggggtggaaggcaatgagagatgatcccttgttgaagcagggtcatttccaaatattccccagtagtgatgggagctgggtgatggaaggatgaggcattcggagagggccctcttcattctgcagtttccccaaattcagcttgcccttcgagggaaggggagtagggaggatactgagaagctctcaacgggcagtttgagggcaggaaagaagctcttagaggagcaagagtctcagggcagagcattgggctcagtaattcagaacctgttcatattccagctggatgcagtggctcacgcctgtaatccaagcattttgggaagccaaggcaggcggatcacttaaggtcaggagttcgaggccagcctggccaatatggtgaaaccccgtctttactaaaaatacaaaaattagcctggcatgatcgtgcatgcctataatcccagctacttgggaggctgaggcaggagaatcgcttgaacccgggaggtagaggctgcagtgagccgagatctagccattgcactccatcccgggcaacagagcgagactctgtctcaaaacaaaaacaaaacaaaacctgttcatatcccttctccttaaaatagtggagaccctggccgtattcttgagaagaagtaagaacacaagcagacatgcttctttgggggaggaaagaaaagatactgttgtgttattacaaccacttttttttttttttttttgagacagagtctcactctgtcgcccaggttgcagtgcaatggcaggatctcggctcactgcaacctctgcctcccgggttcaagtgattctcctatctcagcctcccgagtagctgggattacaggcgcctgccactacgtctggctaatttttgtatttttaataaagacggggtttcaccattttaggcaggctggtctcgaactcctgacctaaggttatccgcccgcctcagcctcccaaagtgctgggattacaggcgtgagccaccgcgtccggcctacacttttatctagaaaatagatgccttatattgatccccacccctacctcacaaaaaaattccccttgcgcaacctacaacaagcaagttgagtccaaagcaagaaaatggaaagggagctctctaaggttcaccttcctgcccccttaagttcagtcctgaagccccgtttaaagctccttagaagcaactcttgagagtatactactcttgcccattttacagacagaaaaactagttctgagcagtttaaatggcttgcccaagcaggtcagcggcggtccccggccaggaagccagcgctgtgtcccgcgtcccggccagccagcggtaccctctccacagcaccaaactgaggcttccacacggttcgggggcatccgacgaatgaacctcattctccccagcctaggtggtgagggagagtggccccgtgccaaactagggtaggatgtcccctctgggctcttgcccgtctgtccggtctcgtctctgcacccaccccagcccatcagtgcggatccgcgtgcctgtgtggttccagcctggcacggggaaaaaactgcccggctctttatgttcaagtgcgaagggggcggaggacaggggtagggtaacgcagattgtctgctcacaggggactgccgggtggcctgactgccgagttctgacaggtctcaagcacacgcaccgctctccgccaggtacacacggcgtacctccgcctccttgcgcagctcctggcctccgcgctccgcgggctgggcgtccaggtggccccacagtagcagctgcagggcgcgcagcaggaggccgacgcgcgcgaccatctcgccgcctccggtgcagcccggctcggggagctactgcgcgcagggaaccagccggcagtcagccgcgcccgggaccccggggatgggactgctctgcgccgcccccgcacggagagggactgtcccggggtttcgccagtgccctagctgcgcgctctgggccgctcctccgctgcccttcgccgggagccggccagacgtcgtccagcccgggcagtgcctgcccgcgggtccgccggccccggggaccgagggagggaggaaggaaaggcaggcggagggggcggaggcccggcactcccgccccacccaccccgcgccgctgctggaacgcgaggcggtcccggagcctcttccgttcgctgcacagcctcgccctgcgcccgccaccgccctgcggatcggtcctctcgcccgccacctccagttgacccggatctgtccagggagggtgaaggaagaaaggccttctcctggcaagcgtggctacctaagacttcgatgaagagaggtcctggtctaccagagggtcgttgattgtttcagctgggtggggagcgaggcccccacccagggtcggggtgcgagagaagcagcacagagctggagtcagaactgggtttgagttccagacttgctcctttgctagccctttgagtcctgcctcagccacctgctggctgtgtggtcttggaccagtcactcaccctctctgaacccacttttctcatcagtaaatgggataataagaataccgatattctgtgactgttggggagataataacgcctgtaaattactgaacagggtgcatggcatcacgaagtgtgcacttaataaggggcaggctgcagctgtgtgatctttggcaaaggatttaactacttcgagcgtcagtttcctcatcaataaaatgacagcatacgatatttagtgcccagcgttgcatgaggatgaaaagagaaaatgagtgtaaagtgcctgattttatataccccataaggttggagtgaaacggtttacgtgaaagcctttgctaaactcatattgagcaaaaagtaaactattttcattatctgtctgtgtaactgagagctggttgctgtctcacttctacccaattcactacattgtaaaatgcaaatggaaaatgatactgagctctgggggtcattgtgggattagatgagttaatgtgtgtaaaaataatctagaatccctaaagtgctgaacaaaaataatgctgtgttccaaccctaaggctcagggcctcggtatcacacaacgtttttgtactatttagaaaaatacaccacttgtgtggaggaattggaaaaagcccttttaatagacattttatgtgtgtatatatgtacatatgtatttttaagacagggtcttgctctgtcgcccaagctggagtgcagtagcacaatcacagctcaccgtagccttgactttcaaggctcaagcaatcctcccatctcagcctcctgagtagctgggattgcaggcatgtgtcactgtacccagctaattttttaatgttttatagaagaagggatggaaagattctgcctggagaaagaattggcaaacctaggtctgactccagcttgttccacagtgtccttaccaactgatgatcatcagagctccctgcccaaagcagggctatccggcctgtcaaaatccatctactggtaaaagccaccatatatcatgccatacctgtaactacaaacacacacacacacacacacacacacacacactctctctctctctcttgctttctctctttctaaggttgccagatgaaacagaggatacccaattaatcctgaatttcagattaatgatgaataattttttagtataagtgtcccaaatattgcatagcacccagttactttttaaaatattcattaatctgaaattcaagtttaactggagtcctgtatttttatttgctaaatctagtaatactatctcactctccttcagaagctccctccccaaggtccactgcagggttttgattgaatcagccgctgtgttacagtctgttctttttggggggatatgggttgagtacagggtcttgctgtgttgcccatgctggcctcaaactcctggcctcaaacgatcctcctgagcagctgggactacaggcatgcactgccacgcccacctcgcagaaggaaggaggaccttcctactagttacctgacaaggctggaagctctctaagagcaaggggcaggccagcttcatgtccactacctctggggcaccaacccaggcagggatgcttcttatgaatgtgcagagggcatcctcaaagaggggacatagatggcaaagagatccatcctcaactccagaaatcttgaggctccctgacggggatgcgtctgcacatcctttttctcattggtctgcccagagaagtgcctttttaaaattggtatgcccaggatggatgcccctttttcattggttggttggaaggtgaacaggacctgtttccaattagtctccctcaaaggaatgcctgtttctttttattttgtttctttttatttcgttctttagagacagggtcttgctctgactctcaggctggagtacagtggcataatcagggctcactgcagccttgacctctcaagctcaagccatcctcccacctcagcctccggagtagctgagactacaggacacaccaccacgcccggccaggaatgcctgtttctaaaatgtttattctggctgggaatgcctgctctaaaatgtctattctgactgagtgcggtggctcacacctgtaatcccaacatttcaggaggccaagatgggaggatcacttgagcccaggaattcaagaccagcctggccaacatagtgagacacactatgtctgtgtcacatcccagaggttctccatttcagcttcactgggaagagacggtaagaggagaagtcatggttctctggagggctgaatgtctgggaggagacaagcttggccacttggaaagctgatcctgactctctctgcatcccagcctagctctggtccctgaacccctcaaactagcaccactgtgcatttgaaagttgactttctctattttccttttgtgttcttggttggattatttcatcccatcctttcctctccctatgccatctctgcttgtggtcaccttgaagtgccatccagacttgaaactgcctgcaagaatttatgcagaacaaagctttctccacccatatgcttaccctgggcttcaaccctgcctttgcgtaggatgtctctttcccgggaagataacatatttccatggtttgaatttgggcagcaggaggttccggttcccttcttcctctgaagattactcataaatcccagagcaccaaattctgtgatcttcaaaatccaggggcctgtgaagccccacaagtgtgacttgctgcatgttttcatgtctagtacacatcctgagccaaaatcactttggatggggtggggagggtgggcagcagcttgctgtgtggatgctgggaggatgggagggggtccaaggagaaaaggaagatgaaatcggggcagtttattgagaagagactcagttcatagcaagggaatctggagagtgactggagaatggctttggatcagggattctcaaaccatgacccaaagattacccacatccaaaagaatactgtggtggcaagtccctatgttaatccaataccattatttcctactctggtaggagtgggtgtggggatgggaatgaggagttggaacaaatgatagtgattaatactgttgagaaattaacatgggccacatatgtgctaatgtgctttacataaatcatgtcattgactctttgcaacttccttatgagaaagctactattacaagcatcctaattttaaagatgaggaaactgaggcacagagagattgtatcatttgtccagagtcacaaatcttataacggtttctcgtttttttgttttgagacagagtatcgctctgtcgcccaggctggagtgcaatggtgtgatctcagctcattgcaacctccacctcccaggttcaaacaattctcctgcctcagcatcccaagaaactgggattacaggcgcccgcaaatgcgcctggctattttttttgtatttttagtagagacggggttttgccatgttggccaggctggtcttaaactctgggtttcaggtgatccacctgcctcagcctcccaaagtgctgggattataggcatgagccactgcacccggccacaaatcttataatggaaactgtaattcaacctggatgctataactccagatctagggcctataaatactacactatcttacctcaagtcaaatttataaaatatgattcttagatcacttgcattgaatcacctgaaaaattcagattccagacccctactccagacctactgaattactaattagtaaataccagcttccaggaggaagataggttttcccagggtctgtttctctccttccttttctccctgttttggctgagcagattcctgacccagcttggatggtagttctcttcacagctcctcttcaaagagagctgcttctcctccctccctctctctgcactggggcttggcttagatccacagtgcctcccagcactcccagagtggacaggattctgtggaattcatgccagggcctgggcacattgcctgcccaggggagtgtctggcagtggctgcttcccagccattcctcctgctctgacagaagacaacagcaggacctcttgaatcaggcaggatgtgtgagcctggacaaggttcctctgggcctcagtttctctctttgtaatatgtggaacaatcagctttgtctctgccccttcctcctccccaggaagtgtgtggaacacaatgtagattttctcaggaagaattctgggctctggggacaggcactcaagagaccaacctcaaacacataagcagaggaataattagcagaataatgaggacatgatgttagattgggagagctgaagaggaggccttcctgagttgtgaggacttttgccgtgataatttaaattcatttttgagcatagcctctgcatttttagctgtgattcaattccagaagccctgactctagcaaccatctctgcctctggaagggaaatgtcctctctctggcacgtggggatatggtctcagcagtctgggtcccattcacaggcatacctcactgtctgctcccccgtacgtgtacacatatgctcatacgggactggaaaaagtaagaaatttggagcaagataaacctgagtttgaatctcaactttttcacattctctgtgacttttgcaagtcaactaacctctctgagtttctgccattataaaatgggaggaaaataattcctgccttttctgctatcccgtgtgcaatgcggaacaagctagacaattagaaagtgctaaatccggctgggcgcggtggcttaagcctgtaatcccagcactttgggaagccaaggagggcagattacttgagatcaggagttcgagaccagcctgaaaaacatggtgaaaccccgtctgtactaaaaatacaaaaatttggctaggtgcggtggctcacacctgtaatcccagcactttgggaggccaaggcgggaggatcacctgaggtcaggagttcgagaccagcctgaccaacatggagaaaccccatgtctactaaaaaaaatacaaaattagccaggcatggtggtgcatgcctgtactcccagctacttgggaggctgaggcaggagaatcgcttgaacccgggaggcggaggtttcggtgagccacggtcacgccattgcactccaacctgtgcaacaagagcaaaactccatctcaaagaaagaaagaaagaaagaaagtgttaaatcctgcaaagtgctggatattgggtgcacagacctgaaagcacagtcatgcattctgtgcacaggttcacactggagcacgcttacatccaaatgacatacacaaacctgccccaggacagtcacacgagcacctccgctcctggcaatgatctgtgtctcagagcagccccatcttccctaactctcatcatggtctagcagggcgtcatcctcttcttgttttttactcacaccaggacccagcagacttgcaaggagcacaataaaagcctggccaatctggcgctgtgccccacttcccttccacataaaggctgtctaaccaccaggcatctggcctgaaagcctgggccaggacctgctcagcatctgctgctttgcttaaaagacctgctaacaggaaagtgtctggttcctttctacccaaacaggaagcgcctgccactgttgggaggacggggtagcctggtcatttacaaggagcctccctctcctgcactggagcctcagagtaatcaccctggcagggccgctctctaggaaggccaggggagaagggcttcagggacgcctccactggggtgggagtggggtggtgacaacagctacacactgcctgtggcaattggcaccaggtggttgtcgttctttcaacaaacactcactgaacacttactctgtgccccatgagagacataaggaagtcctagataaggcctttgagcttgaggagtttaaagacgagacagaaagacaagtcatgctctttttttcccccatttatttattcatttattacatgccattgttttttcctttttaaaaatgctagtgttgggccaggcgcggtgtctcacgcctgtaatcccagcattttgggaggccgaggcaggtggatcatgaggtcaggagatcgagaccatcctggctaatacggtgaaaccccgtctctactaaaaatataaaaaattagctaggcgtggtggcgggcgcctgtagtcccagctactcaggaggctgaggcaggagaatggcgtgaacccgggaggcggagcttgcagtgagcagagattgtgccactgcactccagcctggaggacagagcaagactctgtctcaaaaaaaaagaaagaaagaaaaaggtacaccatgcaaatagtaagcatcagaaaattgtattaatatcagacaaagtatacttcaagaaaaagaatactactaaagaagaagagagagatttcctaataaaaggatcaactcatcgagaagatatcatagtcttaaatgaatataagaacttcaaaatacatgaagcaaatattgaaagaactaaagggagaaacaaaaacttcccaatcatatctggagattttagtacccaactcttaataactgctaaataaacagaaatcaataaggatatgtaaatcttaacacaatgaaccaaatggacctaaccgacatttataggttattacacccaacaagtgaaaaatacatattctttttcatatacacatggaacattcaccaagatacactgtatgctggcccaagaaacaagtctcaataaatattcaagaatcaaaataataccaagtatattctctgactataatggaatttgattagaaatcattaacaagaagatatttaacccccccaaatatttgtaaataaagaatgtaattctaaataatctgtgggacaaagatgaaatcaccagggaaattagaaaataactgaatgatgaaaacctgtcacatgaaaaactacggcattatgaagctaaagcagcacttagaagagaatctgtagcgttcaatgcttctattcaaaaagaagaaaggtgtaaaataaaagaatgaagcttccaccttaagaagctaggaagagttgaggaaactgaacccaaaggaaacagaagaaagaaaataataagattgttattcactgaaacagaaaacagactaagaaaaagaaaatcatcaaagtcaaaatgagtcattggaaagactgataaaattaataaactcttgctgcttctcaaacattttccagtaggttattcacaaatttgcattagagaccagcagtggatgctctcagcatgtaggtgtagccctcttgccactcgtgggggagagacatggagggacgcacagcccccaagactcaagagatggagggggaacctgggagacccagacctccaggaactcattagacatacaggacatagggataggtccctggggtgttttctgcatggacccacagcctgtagggagccaaggaagagccaccttcatgcagagaagaggaaaggaaaggatagcagagggaagtcaacctgagaagaaactcatgaacaattttttaaaaaatctaggtcttggggctgggcgcggtggctcacgcctgtaatcccagcactttgggaggccgaggcgggcggatcacgaggtcaggagatcgagaccatcctggctaacacggtgaaaccccgtctctactaaaaaaaaaaaaaaaaaattagccgggcgccgtgtagtcccagctactccggaggcggaggcaggagaatggcgtgaacccagaaggcggagcttgcagtgagccgagatagcgccactgcactccggcctgggcgaaagagcgagactccgtctcaaaaaaaaaaaaaaaaaaaaaaaaaaaatgctagtgttggactgggcgtggtggctcatgcctgtaatgtaactttgggacgccaaggcaggcggatcgcttgaggccaggagttcgagaccagcctggccaacatggtgaaaccccgtctctattaaaaatacaaaattggccgggcgaggtggctcacgcctgtaatcccagcactttgggaggccgaggtggatggatcacgaggtcaggagttcaagaccagcttggccaaaatggtgaaaccccgtttctactaaaaatacaaaaattagccgggcacagtggcagaagcctgtaatcccagctactcgggaggctgaggctgaacccgggcggcagaggttgcagtgagcggaggtcgagccattgcatttcagtctgggtgacaagagtgagactccgtctcaaaaaaaaaaaaaaaaattagccaggtgtggtggcacatgcctgtaatctcagctacttgggaggctgaggcaggagaatcccttgagcctgggaggcggaggctgcagtaagctgagatcgtgccactgcactgtctgggtgacagagtgagactctgtctaaaaaaaaaaaaaaaaaaaaaaaagcctactgtttcaggcattgtgctgggcactggacattcagaaaggaattatgcaacccaactagagagcaaacaggcaaagcatgcaagccttgaattatgcagtacaactgtgagttccagaggatttcaaaaaaggcaaaaaatcatcatggtctggtttttactttggtcagagcaataacctttccctgccctctagagtctatgctttaaacagcaggcagagtaatcctggtaaagcagttcagatcctgctgggcctctctgttcaaatggctccctctaatggtttcccctctcactctaagtgaaaccttacaatgtccttacaaggtcctataccattggtagaaaggttggggaagccaagcaggggatggaggcaactcagaaatgatcaatagcaagaagactataagctgtaggtggggggacagagggaggaggcaggttactagggccaaggagccggggtcaccaatggaaactggagctctgagacttccctgaggcagagtgggagggggaaagataaccctcttctttcctttcttcctctcttcttccacctaatttcccaccacgtctcccctcggccaattcaagctgaaagataccaccagagggactttctgaaactgaaacaaggcaactctgtaggggtctgctcccctgtgaggacaggaagaatggatccagggccaacaggcccagtaccaagactttcttttttttttgaggcggagttttgctcttgttgcccaggctggggtgcaatgatgtcatctcggctcactgcaacctctgcctcacagtttcaagcaattctcctgcctcagcctcccaagtagctgtgattacaggcatgcgccaccacgcccggctaattttgtatttttagtacaggcagggtttcaccatgttggtcaggctagtctcgaactcccgacctcaggtgatctgaccacctcggcctcccaaagtgctgggattacaggtgtgagtgagccactgcgctcggcctggagaccttctcagatacattctgctaaagctgatgtgtaaaaatgtacctgctgtcttccctaaatatgcagcctgaggccaggagggaggatgtagagggagcaggatcttgcagcatgaagaatgcctgggtgattgccgggcgcagtggctcaagcctgtaatcccagcactttgagagatccagacgggcagatcacctgaggtcgggagtttgagagcagcctaaccaacatgatgaaaccctgtctctactaaaaatacaaaaattagctgattgtggtggcccacacctgtaatctcagctacttggggggttgaggcatgagaattgcttgaacccgggaggcggagagccaagatcacgccactgcactccaacctgggcaacagagtgagactccgtttcaaaaaaaaaaaaaaatgcctgggtgatggcttaagtttgttgcagataaccatttgcaatggaatcatttccaggcaaagacctggaatgcaggagggcacaggagtcagtctgtggtagagaaggacccttggaaagaggccccagagcaatgcagacctgggaggagttctttgtatcccagtgtgggagaacagcgacactgtgaaaagaacactgagcattgtccaaaggcctgggtatgagttctcatcagctgtgtgaatttgctcaagagtttcacctccctgagctgcagtgtcctaattgaccaaatgtggatagcagcactacctgtttcataggcccattctagaaataatggatatagaaaatgttagtcctttgattacattcctcagaagttccccattgttttaaatttaatgttcaaactcctctgtaaggcacacatggctctttggaatgtggcttctgcctacttctttcactccatttattacaactcctcactcctgcaactccatagaccagccagactgaaccacttgcaattcccagaactttgctctctcccagtctttgcaaatacaaccctttctgcctggagcatgatgttcctggtatatcctcgctgcctaattcctgtactttcttcaaagttcagtttagggggcacctcccacaggaagccctctttgataccccccatccttcatgtgggcaaggtgcccttcttttgtgttttcagagcgcactctgcatcctccaatcctagcacatccagcagttgattgaaatcacaggtttggcaggacaagatagagttagtgcaggtcctgatgcacgggtggcagcaggtcagcagacacgcagcctctgagactatctacagaattttatcaggacaaatggtgtgagggttggtacattagtaggggaagacaaatacagaaacaaatagtatgaagacaacaagaaactttttggaacatggatggagctggaggctattctccttagcaaactaacaggaacggaaaaccaaatactgcatattctcacttattataggtgggagccaaatgatgagaatttatgaacacaaagaaggaaacaacagacactggggtgtacttgagtggggagggtgggaggagggagaggagcagaaaagataactattgggtactgggcttaatatgtgggtgatgaaataatatgtacaacaaatccctgtgacatgtgtttatctgtgtaacaaaccttcacatgtacccccaaacctaacataaaagttaaaaaaaaagaaatcacaggttcacactgttcctgttatgagactgtagttcctggaaggcagaggctctccttcctatttctgtctctccaaggccttccagagcctgtcacatagtaaacctccagagatggcaattgaaggaggagtgaatgaataaatggtggtacaaacttaaggagtcgatgagtaacacttttggtatttccttctttgaaaaaaattctcaaaaaaagaaaataaataaaaaagaacaaccctctaggtccctttagggatcttctagaattacctcttcccctcccctccataacccaattctcttctgttggacatgcccatcttctctgctgagctgccttcctcaatatatatgctaaacagtttaatggtttttagtcatgaaataattttcactcctttagtcttgcttgttggaacttatctagagcgttctgtgaccctctttatctagagttgagggcacaatcactgctggtataatggggagagatgacctcacgtcttttttctgacctgaaggtattaactctgaacttcccttttcacctccattgcaacctgctcctccttttgttccctatcacagtcaatgacactaccacccggcccccgtgtctacgcaggaaacccagaattcaccccagactcttctctctccactaccctctccaacccaggtgatcaccagctcttgtctagtctaccccggggtatctctgagatcgcttcacttacctctgtctccagagctactacctaagtccagggcactgtcatctctcaccaaaattactgcactggccacctaattggtctctgcttttaagcgcctctcatccccgtgcatttttcatttggcagccagaaaatacaaatctgatattactcctctcctataaaatcctctggtgagtggttctcatttcctccaagataaagtgggaactctaatgcatttgacaaggccccagctatttagccccctccttttcgggcatcatctccttctactctccccttgaagaactacttgttacacaactagtctgcaaagtactttgctcacttctttactcggtcaacttctgcacaacacctagggtttggctcagataccatgccttcccggaaaacgtctttgctggctctctgagcttttccagcccgtttcctgctgcagagcccaagcggccttgggcccaccccgctgggccgtgcagcattttggttaaactcatatgcaatatatcgttgggttaccaggcttcaaattccaccttggccgtttactagctgtacgacctaggtcaaatgaattctgtcttctcatctgcaacatggggaaaatatttcatcagtctgttgtgagaattaaatgagatgatgtaaggtgcctgacaattaagagtcagctattattatagtgctgaaaattaaagctcgatccctccgccccgccacattctcagggtcagattcgtgtacgatttcgttttaatgtacccttttcttccagcatccttgtttgctactcggcgagacagttacaacaaaccgggaagcgatcaggtacgcgagctggtcacgactcacagtcccagagctcgccgactccgaacgcccccaggtggcccaagcactctgcagcaaaagccgccagctaggacgtaccattcgaaattgtagggaaagaaaggctttgcataaccaaatactctgtgtttataaggtccctcctctttcgtttcctaaccgcaaattccatcacacccaataaagtgagaaataggattgtaaataagacggagcaagtaggttccacttcctccccgatcgtgatcgtggcattggtactttctcttctcaattccctctcaataatggtacggctagcggaggggggaatagagggccctgggaaggcctcagggctcggcggctagtaccagtgcagaaacatccctcctgccgcagctttgtggtaccacccgctgcccgctgattggctgccggggtcccgcagtccgcctcagcccgccgcgccgccctcagtacagctccggccgccgcgccgcctggctttcgtattcgttgttctcggcgggctgtggggcctccgcgccgcggccgttagtcatgtcgggtaggtgacttcttcagcgagcagcggcagcgacgagaaggtcctggcggggttgggctgtcttcccgcccaccggagggccctgaggagaagcctccggccctgagggaggcttggggtgggggggcggccgctgccgccgccatgttgaactggaggcacgcacgctcccaatggctccccggctgcaaatcacggcgggagcgcctcgggcctcttgtcttttgaccctgtccttggaacccgaggagacttgccgttcccgggggagggtgtgtgtgagtcggggggcggaggccgtctacgccatcgtaggggcggggggagccgagattagagcatcagcctgagagaagcggtgcttctggttctccgctccgcctcggatctttcagcgaggcctcgggccagtcatctcgccgcctcgtacctcagttttcccatcctcgaagtggagctgggcctgcctgactcacccattcatcaggtgggggccttgacgctctgggagccctttcaaaggacgttgccttacacgaaatcgtacttatcgttattcactctgcagtaaccacctggatttgagttgggggtgtttgcatagtaatttagcttcctcttcaccctcctgccattcgtcttccccaccagtttatctcctgaaagagtttgaaagtgagccttgtctatctattattgataagctcctgtaggtgtatgtggcatttaccttaaaacatgcagaccaaaggaaaggcaatcttttttccccccacgaagcagttaacttggcagaggccacccattgtgtggaagagaaagagaggcattagtctcttcaggacaaccagtttggatcctgctaaaccagaataaaaagtctagaacatggatgtcctcttgatttagcagatctagctgttcacacagggtcctctattgttaggctgcatcacgggccgcaaagacccaggtgtctatccacttgctagaaaccatcatgagagttagataccagttttctgctggaaatacagaacatttcctgaaaccgtgtggttgaggtgaaacaggcattttgcagtcttatattttgagtaaggccaaacctgcctagtgttataaaactagacaaaaaacccaggtacccggtcttgcaggatagaaatgtgtgactaaaatgaagcatcgatctgagaagactacaaattagcgggaacctttggacaggagcatgctatacattacttagattaatgttgatatttaaggagccaggatattgatttgtttttgaggggtgcccatctacttcatataagaggctataaactgcacttctttcagtttctgcttaatccttgctcaaacaagaaataatttcttattccaaagtagacattggtacatctttttctaggtacgtaatttgggatgaagtctgataaagctccttagaagttcttatagtacaccctcacaagagtgtatcatctacccgtggtttaaacagaaattaaaattctaccctcgtggagaaatttaccaagttttaatggtttcagtcctcattaaaaacttttagcctgtcttgatctttaacataattattgatataaaacaatggcttctgtggaaagtcgaagttttagtggtttgctatttgtaaaatacaggctttttcatgtatcatataagcatataagctggcttaatcattagtattgatcttcaagttactaagacaccagatatttgttattttgtagttcgagtattttttaaaatacgaaattggcttttcggtgtgtgaaaagggctacttactagacgcttgtttttaaattaacattcaattaattaaagctagactctttatattcttaggcttggtatactatttatatgttttgtaataagtgtataaaaataatacctttgactttgtgtaaaaataatgcttttgacttgttctttgatgaatgtttattaaaatcccccaaaacaactaatgccattaataattttagttaagtcctttaaacattccagactacacatgtaaatttaatatatcaaattgactcaaccactccaaaaaacctaataaagtataagcactgaagtaatcaataaatcaaaattgtagaaattataagtcagagtctaacattcaaatactgtttacaacgtgaattagctaacaccttaacgaattcaaatcagttacacacataaaaattacaaagtcaagataacttctcattctggcagtgtggcagaccacgattaacttgaaaatctatctacaaagatttaaaaaaatggaaaaactaagaaaggacaaacccccagtgccaaaaatgaagtaggagccagcatggcaggcaaagagctaacttgccagctaccctggagaggagggcatacaccttttttagacacctgggttttattgctcaagtaactgtgtagggaccagagataaaacgtacggaccattaacgccaggtaatgggaactgagactcttaacataaattctagacttaatgtgttatggagttaaaggactgtacattatgtgaaggaatgaactggaaaaaaccttagtaccaacataagagatgacaaggtaacatggacgtttaggctccaggaaactttaagacaaattaacgtaaaaatggtttctgggctggtaatacccttggtgtttctgttaaaaacatgaagaacggctgggcgtggtggctcacgtctgtaatcccagcactttgggaggccgaggcgggtggatcacctaaggtcgagagttcgagaccagcttgaccaacctggagaaaccccatctctacttaaaaaattaaggcatcctacatgcctgtaatcccagctactcagaaggctgaggcaggagaatcgcttgaacctgggaggcggaggttgtggtgagccgagattgcgccattgcactccagcctggggaacaagagaaactctatctcaaaaaaaaaaaaaaaaaaaaaaacctgaaaaacattttctggaggaaatttcatggtttagatcacaaggaatttcagataaagcaagccttgcaaaagatatgttcatagtaaattgcagagctttaggaaacatttcactgaaatgagagtcaatgacaaataggattagagcctctaacagattatctgagagaatatttttatgtttaaaattgttaaaataaacctaaaggaaggaatcaaccctaagatcaaggttggccgggtgcggtggctcatgcctgtaatcccagccctttgggatcctgaagcaggtggatcacctgaggtcagaagttcgagaccagcctggccaccatggcgaaaccccatctctactaaaagtataaaaattgccaggtgaggtggcgggaacctgtaatcccagatccttgtgaggctgaggcaccagaattggttgaagctaggaggcagaggttgcagtttgagacactgcactccagcttgggtgacagagcaagactctgtctcaaaaaaaaaaaaaaaaaaaaaagatcaaggtgttaataaaacaagccacatagatttgaaaaagaatcaagtaaaacgtttagaattaattaggaaaagtgaataagttggaatagcagacctagcagaagaaagaattacagatatgatggatgtgacttatctcacagatgtggaaggtagatgtgatcttccagcattcaattcagggggataagatatgaaaatgaaagatttcaggcatggtggctcatgcctataatcccagcactttaagaggctgaggtgggtagatcgcgtgagctcaggagtttgaaaacagcctgggcaacgtgatgaaactcccatctctacaaaatacaaaaaagatcagctgaatgtggcggtatgcatgtgtaatcccagctactcgggaggttgaagtgggaggattgcttgagcccaggaaatcgaggctacagtgagctgtgattgtcctacagcacttcagccttggcaacagagcgagaccctgtccccccccccccgcaaaaaaagattaagaaacatgggaaatagattaaaaactcctgtcatacatctaataagagattgagaaggagaaaatggaggaagaatcaatagttgatttccaaagtaaatgaacattttgaattgaacactagatttaaacatgaaacattcatacctagatacattgatgtaaaaatgcaggttatgaagtaccagtaacctactagagaaaataggaagcagtggtatgattaataacagactaattaaatatttgaagaagctggaaaataatgaaattatccattagagtttagagagaaagtaaccattgactttgaattttcttttttctgttttttttgttgttgttgttgttgtttttgttttttttaagagtagcggggactgacaacaggtgcacactgccttacctggctaatttttaaaattttttgtagagataggatctttctgtgttgcccaggctggtcttgaactcctcagctcaagcaatttgcaaacaccaaccaaaaggtgattttttttttttgagatggagtctcgctctgtcgcccaggctggagtgcagtggcgcaatctcggctcactgcaagctccgcctcctgggttcacgccattctcctgcctcagcctcccgagtaactgggactacaggtgcccaccaccaccacgtccggctaattttctgtatttttagtagagacgggatttcaccatgttagccaggatggtctcgatctcctgaccttgtgatctgcccacctcagcctcccaaagtgctgggattacaggcgtgagcaactgcacccagctgatttttttttttaagttatgttactagccaaaataaagttcagacgtaatgttaaaaggaaatcaccaggaacataggcctatacttttgtgtgcctaataatatatacagaaaacaggcccacctgtaatcccagcactttgggaggccgaggcgggcggttcacctgaggtcatgagtttgaaactagcctggtcaacatggtgaaactccatctctattaaaaatacaaaaactagccgggcaaggtggtgggcacctgtaatcccagccactcaggaggcggaggcgggagagttgtttgaacctgggaagcagaggttgcagtaagtcaaaatcgtgtcactgcactccatcctgggtgatagagtgagactctgtctcaaaaaaaaaaagtgtgtgtgtatatatatatgtatatatataaaacctaaatgacaattacaagaacttgacaagtccatagttatatgggaagttaaaaaaaatacctctttgtgtaattaatagatcaggcaaacagtaagaatatgaccaaacattagtaaaatatgagtgatacaactaatgagcataatgttatagactgatagaattcacttgaaatttagaaaatacataattattttcaggcacacagggaacatgtgccaagggggaaaagcaaaacaggaaatctgagcaaataccaagaataataaaataacttttctggctgcagtggaatattaggaaaaaacacaaagagaatcaaaactatacacttggaaattcaaaagcactttaaatttaaattcgtaggtccagacacaaagcacaattgtcaaataatcacaatgaacagttgtttaggatgccttaatctataaactgattttctctgatgaatgtaaaacacctgcactttatcactcaaggatttataccaagggacagatttactagtcagtacgcttatttctatatcatctgggagtttttaagctagccagctaaagaagttagatttataatttcagagggctgaaatgactgggttaagattaagggccttactgttagatttgagatagggttacaggacctatgtgctgtaccctactaaaattttgcctgaacctaaagaaaatatgctgcgattatgtattttgtcactgggagaacctacatccatgcttcaggatatagtttaacctaaagcttcatgcatccacaaataccttgttttactcattgttttccccctcataacccttttcatcctttgatttgggataatctgatttcctgtcatttcatagaggcatctaatctcttaatggtctaattagattgtgtattcttttccgatttttcttaattggttgttagctacaactctagctatcttctcatgggcctggcagtgatgtgtaattttttctttttcatttcagctagttttatgccctccatattcatagaagtagtagtttgtgtcaagatttcatttaatactttttttctcttttgagacagggtctcattctgtcgctaaagctggagtgcagtggtgcaatcatgacccactgcagcctcgacctcctgggctcaagcagtactcctgtcctggccacccaaaatgctgggattacagggatgagccactacacctggccttcatttactattcttaagcattaaacaaaatcttgttcggtctaattggagagctttactgcagaaaagtggcaaatttggtatcacccacttatatttggtggcaatattttcatattgtagcgttatataaattggatgaaaaagtttgttctaaggacatattgtataattaaattttaaaaagagaaagttactgagcccctatctctaaaaattaaaaatagctgggcgtggtgctgcacacctgtagtcccagctacgcaggaggctgaggcaggagaatgactcaagtctaggagtgagctgtgatggcaccactgcactccagcatgggtgacaggaagagttcatctcttaaaaagaagaaagaaaaatttcattaggttttggtgtgttttagaactatttgacaacagtgatttttgtttcaaattgagtgaggttgggcctgatggtcaacagtttgcgacttagagccattttttgcagttgcaaaagcgtttcataaaatctgctcttatgcgtcacatacttggtcattcatttgactctgagtaaagcctgaaggatagataaatagaacctcttcagtaatttttgatatgattgacattttgaagtattgagaaaagctcatagttcaaattctttattttttatgttaccacccccaccccacccccacttttttttttttttttttttttttttttgagaagtgtcattcagtcgtgcaggctggagtgcagtggcacaatcacagctcactgcagccttgaccgcccctggatcaggtgatccacctcagcctctcgagtagctgggactacaggcacatgccaccatgcccagctagtttttgtgttttttgtagagatggggtttcgccatgttggctgggctgatttcaagccatctgcctgcctcagcttcccatagtgctgggattgtgtgagccaccatgcccggtcccttggtcatttttttgattgctaaattgaagctacaagcaggtattgctgacttgctgtgccaattggctgaatccctgaaagcttggtaaaatcagaatagagcaactaacttagctgctttttttttttttttagcaagtctttggaaatatttttgttggtgctgacagccaaagcagtccaatacagaggaatggtgtatatcttggggtggtaaggatgttcaagtagatgtaatcctggggatgtcatagtgcatgtctttcccctttttggacctgattagttttaacagatgtctttttgtatataataatattgcttaaggtcttgagtctgtttaaagaatggattttcactgtttacatttgttcactgggttcttgtgaccctagcacacatgtagaatagtagtttgcaaatacgtagttattgtaaaaagtaaatactatttgtacaaatttcttgtttcatagtatttaacttgagttagtttttctttctgcagttctttacattttcttaccacatttcttctgtatgagctaaagtcagcctttgaaggaaccataattttaaataagatttaaaattctttttatgtgttctagattctggaagttacggtcagtctgggggtgagcagcaaaggtaaagtatacatacattttaataatatgaaagggtagaactgaggtgaattttgtcaagcttcttctcttgagacttgatgctggatgtcataagttaaatattagcttgtcacagagtgaagagagtcagtgtaaataggtgctgtaagacatttattccctttctgtttttctttatgttttgagacagagtcttgctgttttgctcaggctggagtgcagtggcaaatcatagtgtactacagccttaaattcctgggcttaagcgatcctcctgcctcagtctcccaagtaactgtaatctccactacagacatgtgccactctactgggcttcttccttttcttttttttttgagactgagtctcgctctttcgcccaggctggagtgcagtggcgcgatctcgggtcgctgcaagctccgcctcgcaggttcacgccattctctggcctcagcctcccgagtagctgagactacaggcgctcgccagcacacccggcaaattttttgtatttttagtagagatggggtttcaccgtgttagccaggatggtctcgatctcctgacctcgtgatcgcccgcctcagtctcccaaagtgcggggattacaggtgtgagccactgcgcctggcctcttccttttcttaaatctgtttgcatcaatgaatatacctcctacagattaaaacaaatctccttggtattgtaaagtttatgttttatttaggaaatctcttagaagaaacaattattaaagaaatttaatgtcagacgctatggctcatgactctagtcccagtactttgggaggccaagatgggaggattgcttgaggccaggagttagaaaccagcttgggtaatatagcgagaccttgtctctaaaaaaaaaatttttttaattatccagacatagtggtgtgtacctgtagtcctagctacttgggaggctgaggtgggaggatcacttgagcccaagagttcaaggttgttacaatgagttatgaccatgccactgcactccagcctgggtgacagagcgagaccctgtctcgaaaaaaaaaaaaaagtttaagcaattgaactcaacagttgttttagaaaaagcgttttattatggtgtataatatgctaatgtgttttttcagagcacatttttttaaaataccataaaaaatattaagcgtttttttagtgtgcttaccatcctcacagtaaaaaggaagttctatttttatgtgagtgtatatatgcagtgggcttctcttaccaaaatacagccttcaacttataggataaatgttttacagctcagtgtaagatactcagaatagcacctcagatatcttgtcaaattttaagcttcctgaaaaacaaaactgatttgacttttttgatcttgtaagatagtgctaacttcctagtaggtatctagcaaaatgtttatttggtgaaatgtattttcaaaagttaaggaatcttgttagcacttgatacctttaaaatgataaaaaattttgcaagtgttttagttttctttggatattagaaagtcatagtatagattcagaaagtttgtttctgacttgttagagcttatatactataaaattaatattcaaatcccaggagggtacatttatttagtcagtcaacaaatatttattgagctatgtgccaggccctgctacaatactgaggatacggtataatttcattcaatgactgtactgtggggataaacatgcctctaattattgagacttttaaactggacttctagtgcctccctgtgcatcttttaggaagttaaagccatttaactaaggcaaatggtgggaaaaaattaatctgtcaagatgtgattaaattgagtaaggtgttcattttttgtgtagtcatcatttttgtgcttcaggtatttattataagtcttgctatgtagtttttattccccccacacccaagcataattctcttggaattttctagctcttaccaagttttgtttatttctgcaagattgtgaaaacaaaactttgggtatttgtttcccattcaggagatctgggagtgacttcatgtatttctttaacagtctttgatcgtcacctttcaatttagactctagagacagggagattgatgatttctcagcaaagaagcttgtatttgagttgaaagttgaaaatgaaggcaaggtcttcatttaaactttaaaatttctacacatttctttcaagtattaaatttttcttttgcagttattctacctatggaaatccaggcagccaaggctatggacaagcatcacaagtaggttgaaatataaattgtattcttcataagtagttatttttatcttaagtaggtgatgaaacttgagtatttacctaaatttcagagctattctggctatgggcaaacgactgattcctcttatggacagaactacagcggttactccagttatggacaaagtcagtcaggttggactagtttgttaaatttgttgtttcagagattgaaaaatcagagccttcactaaatgatatactcatctaatctttaggttattcacagtcctatggtggttatgagaatcaaaagcagagctcatatagccagcaaccatataataaccagggacagcagcaaaacatggaatcatcaggaaggtaaggaaatagtaaaatactgagattgttttgggcagtggaaataacactgatattaaacagatttaaccaacaaaatcctagctttaaactttttttttttttaaaggaaattttaatggagtgtggattttacaactgtatattatggagaatgtggaaatagcattgtcatttgattcttatgatgtatttgtgaaatcattgtttagctataaattgatgtccttaaaaatgttagaaaattttggacctctgctttatccctgagattaaataaaaacctgtctttagaattaagacttctcaacatctatttttaaatttccattttatttttgaaccatttgaatatattaacttttcagggacaaaaatattttttaaaagggtcaaaacttacgcatatatcagataccctaaaatgtgttttctttgatatatgtaggtgaatatttactgataaatttcaggttttataaagtttttttacctttcagatttaaagagctggtacttaattttatgctatttacttaatagcaagttactttttaaaaattgtgctttacattctgtgaaatgcttttgcattctctaatgtgattgatcttcagataccactatgaaatagtgtcagtgattcccattttacagagggtaaagaaattatttggcctatcaagtgacgtggctaaaaactgaggtctctagtgttttctttctacagtgaagacatttattctaagtgaaaattaaataaaagcattgaggaaagattggtgaggtcaaattatcacccttacagatgtgagagtgttttgaaaagtagaaagtagagtacaaatgtagggaataatatccagaaggcatactacattaagagaaataactcttcaagccttgttggttagttttaaatttaaggagaatcgttttataaatgatgtatttttggaagcatgacctataaatatagtctgaaaagaaatgttaagtttgatttgacagccattttaaagtgctagggtttggactgtggttgtgttgtgctttcgacagggagttagggaacatactgatcttttattagattgttctgatcctctggtgaagaataaaatgtaaactattaagttatgagatcttttttgtccccccccagcccatttttataataagtaaacctactggaactcaaatccaattaaatgttgccttttaacattcccaccctgagagcatgtaattaatacagtaatattgttctgaagatacttagaattttcctttcaaatcgctagaataagcagtctcattacctgatagagtttttttcagataaaaaaaattgtgttacaaagcaggttcttttactgttttctaaaatgtactatcactgaagatgtttagaagactgtactataggttctaaagataattctaagagaaaagatctaaaaatattttaagagaagacacttgttaaacttcagtgatatagagcctttcattgtaactattaaaaggactcagctcttgtggcatgtttattaaagagtcagacatattactgtactttgtagcatcttttacttttttttttttaattcatagagataggccaggctcggtggctcacacctgtaatcccagcactttgggaggccgagacgggtggatcacgtgaggtcaggagttaaagaccagcctgaccaacatggagaaaccccgtctctactaaaaatacaaaattagccaggcgtggtggcacatgcctgtaatctgagctactcgggaggctgaggcaggagaattgcttgaacccatgaggtggaggttgcggtgagccacgatcgcgccattgcactccagcagcctgggcaacaagagtgaacctctgtctcaaaaaaaaaaaaaaaaaagttcaaggagatagtaaaaagccatagtaattttttgctttactgcagttttcaaagatacattttttttcataatgtggcacctcttcaatgttggcagaatcgtctttcgcagggaattccaggagactgcagataactaattaccatgagaaggtagtcataaatatggttaatgtctctaactggtcaggactcttaacatcagtttcagccaacttgctacagcaaatgtaatcttcctatgaagtctcttaagttctccatttctatttagccaaggtggaagagcaccttcctatgaccagccagactatggtcaacaagattcatatgaccagcagtcaggctatgatcaacatcaaggctcatatgatgagcagtcaaattatgatcagcagcatgattcctatagtcaaaaccagcagtcctatcattcacaaagggaaaactacagccaccacacacaaggtaagatttactgacctctattattatttttccccctctcagaattatttgtatgaatttctgattaaaagaaccacagaggatttcacctgtttgtaaaaatttagggtaaccttgaagatatgttccctctcatggtaatcaaaactagtttatcagatttctacttctgaacttggaggccctcagatggtcatgacttttgatggctgattacgtgaatttcctttttgtctcagtgaactctgatccttgacaatactgctggtaccagttcttttggtgttggtgttgtacttgatttggggtacttatttatgtacctttaaggcctagtacatggtttggttcatagtaggtgctcagttgaataattgtaagtgtaagtaagtgcttgttgaataattgaatagtaaatagtaagtgcttgttgaataattgaatgaataagtaaataagtaaaagtggaagcacattcactaaatatcttctctcagtttgaagattcagttattccttgtccatgctcaatttacatttaaatgtttctgaagtgaagaaagtggtaacttttaagattggggggccgggcgcagtggctcacgcctgtaatcccagcattttgggaggccgaggtgggcagatcacgaggtcaggagatcgagaccatcctggctaacatggtgaaaccctgtctctactaaaaatacaaaaaaaaaaaattagccaggcatggtggcgggcacctgtagtcccagctactcgggaggctgaggcaggagaatggcgtgaacctgggaggcagagcttgcagtgagccgagattgcatcagtgcactccagcctgggctacagagcgagactcttgtctccaaaaaaaaaaaaaaaaaaaaaagattggggtcgtgcttttcatctaagttactaaggttcttgtagctaagattgtattttaactcatactgttccacattactgttttgccatgtcactttagcagaatggaatttgacacagatacattactgttttgccatgtcagtttagcagaatggaatttgacacagataaaattctcaaaaacatgtaattccagatgattttatgatgacttgcatttgagttgtgtgcacatgtgccattttctataaggatatgtgtggcctaaagagccatttaacattgttatttgaagctttagaaatgagagtggttatttgtgtgtaatattttcttttttgtagatgaccgtcgtgatgtgagtaggtatggagaagataatagaggatatggcgggtcacagggaggaggtagagggcgtgggggatatgacaaggatggaagaggtcctatgacaggatcaaggtaagtatgtagataaagatgcgtacatttcttcttcttcctcttttttttttttttaaggtgttacttggctggatcaattccagcatctaatttagttaagagactttaaaaagggattatatattggagaaaaaggcagaaattaaaagtgtattttcagtcttaatatctcacataaatgaccttagaattggctatgttagtagttagtttatgtggtacatgttaaacaccagtagagaaacaactatggttgtgattaaatcacttgactttcctgccagagctagaatcttaactcctttaaaagacgactctgggaaatccagtgtttgtatgtaaaaataaaaggtaagttaattctagattgaggggcagaggctatttcttaatctccaatctccttgggaagggaaagtattaggaggcagtaatggagtagaaaggtggggatggcaaataagagaaagatttaatgtaacaaaactgttttgtccctcttcttaagtaaataattattggaataattagtgtaacatcacatagtaatgtgtattttgtcttgactaagttgtgtaaaggaatgtctttttaattcagcttttcttttctccatgctagtgttatcaggttttggtatttatttacttacagcatatgttatgaagctggtttgaaaattggttttagatatatctgcaagtttactactttgactgtaaaaaaaaaaaaatgaaaaagtagttgacatctgtcctcagaagaagtttgcaggttgcatatttgtgtgtaaatacacaggctaaaaggtaatttatgttccttgggaattgaaatggtcagtggcccgttacagaaacttatcagtcatatatcagcaccagttcattcttttgcaccttagggaccatctgtcccctgaggtgacctgagaaacaaccagttgcccacagactgttatttcttcaagtgagccaggatttgatttcactgccttatattctatttttagtgtacagtgctttgattttttggaaaaactaaattttaaacatatttgaaaaatgttataagacttggacattaagtctgttgatagccaaagtcagtttaccaaagtaaaacaaataaattctatgcttcttcattgtcaaagagcagtctgccatcatgtggatataaatggactatgtaaagtgacatggtgcttactctctacctaataatagcctccctcctgttccaaacaagataaccaacaggtatatttaatttaccagttaatatgttttggataattggctgccttgaaatgctatatgttttatagtacatcatagctttagttttcttcataaggaaattacagttacatcctaatcgattattaaactatcactgtgtctaagaatggtggaagaagatagggaataggtagggaagtcattataaatatattttcactggccaggcatggtgacccatgcctgtaatcccagcactttgggaggccgaggcgggcggatcacgaggtcaggagatggagaccatcctggccaacacagtgaaaccccgtctctactaaaaatacaaaaaattagccagacgtggtggcaggcgcctgtagtcgtagtccgaactactcaggaggctgaggcaggagaatgttgtgaacccgggaggcggagcatgcagtgagccgagatcgtgccactgcactccagcctgggcgacagagcaagacttcgtctcaaaaaaaaaaacattaaaaaaaaatgtattttcatttgtgactcatcttgtaactagaggatcgaaaggactttgaatgatcctcctgacaaaggagggaagcagtaccttaatcaaccctggggtccaattaagtacttttataaaccccttgcaacatacttcatataatttgtggcctagatactgacttataaactaaattttttattttcctttaataccccttaatacaaaatcatatgcagaagtccaatatctagttggtccaaatgatgtgctgatctggtttcagtgggggaaaggtcgggtgaggaagggatctgcaatcttgccttatactctgttatttgttgagatgttcatgaaaggccttttttagaaatccgtatggatgccgattactctttatattgagttggcaagctgtgtgaaaggccagatagtaaatgttctgggtttggtgaaccatatggtttctattgtaactattcatctctgcccttggagcaccagagcagccgtaattaatatgtaaatgaataaacagagttgtgttccagtaaagcttcatttatggatactgaaatttaaagttcatataatttttttttttttttttgagatggagtctcgctctgttgcccaggctggagtgcagtggcaccatctcagtttactgcaacctccacctcccaggttcaaacagttctcctgcctcagcctcctgagtagctgggactacaggcgtgtgccagcacacccggctaattttttttttttttttttttttaagtagtgatggggtttcaccgtgttagctaggatggtctcgatctcctgacctcgtgatctgcccgccttggcctcccaagattacaggtgtgagccaccacgcctggctgaagttcatattatttttatgtgtcataacacataaaattatttttatgtgtcataacatctttttaaagatgtgctttttagcttatttattgggataaaatgttttgaatttgaatatagatgccctgttttaagatttttttttcccacacagttttgcatttaagtaccagaatacccaaacatttttcattagtcttcatcaacactcccgtttgtgttctcagtcaaattaaaaatagcaattcttggccgggtgcggtggctcacacctgtaatcccagcgctttgggaggccgaggcatttccactaaaactacaaaaaaattagccgggtgtggtggcgggctcctgtagtcccagctaccctggaggctgagggaggagaatggtgtgaacccaggaggcggagcttgcagtgagctgagatcgcaccactgcactccaacctgggcaacagagcaagactccgtcgcaaaaaaaaaaaaaaaaatagttcttttgggggctgtttgaagaatatctggcattagttgggtttatattaaaagaagaaggggcatgggccaggtatggtggctcacgcctgtaattccagcactttggagggcacagcgggtggatcacctgagatcaggagttcgagatcagcctgaccaatagggtgaaaccccgtctctactaaaaatacaaaaaattagctggacacgatggtgggtgcctataatcccagctactcgggaggctgagacaggagaatcagttgacctgggagttggtggttgcagtgagctgagatcacaccattgcattccagcctgggcaacaagagtgaaactccatcgcaaaaaaaaaaaagaaggggcataatttgtggatgaggattggatataaggtaaaggatgggacattcttggacttacagatggtgtgattgcctggctagaagaagaattcccggtcaaaaagaaaccatcagctttccaagtgtgaaagagagataaatctgtgaagattatagggactacaggaaacttaatctttttctttgaaaaagcaattgtagcaaaaaaaaagaaaatttcttactgtcatctaaaattgacatggacatcttagtggactagaagttaagggcataaattctcccagtgatttttaattttagcattgtgattaacaccttctaaaattgccagaacttaataaataattgcttttcattattagtatgccatcaaatttagtagctgtttcaggctttaatgtgtcaagcctaaaatccagatttttgaggatcttctccctcttaaaagagtattcagttaactgccgtagaaatacacatgtatacaagggcactgtatacatcagtctaaaaaataaaaatatgtatacgttctggtgagtctagcacagcattgcccaatagaaatacaatggaggtcacaaatgtgacccatatagttaattgtaaattttctaatagccacattaaaaagaaaacagcacaaataaacaaatgagaaaatctatttaactcaatatattcaaaatatttcatcatgcaatcaatataaaaaatttctttttgttggtcatgatggcctgcgcctgtaatcctagctacttgtgaggctgaggcaagaggattgcttgaggctaggagtttgtgactagatgggcaatatagtaagatgtcatcttttaaaaatgaaaaaattagctggccactgtggcacacgcctgtagtcccagctacttgggaagctgaggtaggaggattgcttgagcccaggagttcaaggctgcagtgagctatgattgtgcttatgaatagccactgcactccagtctgggcaatagtgagtcggtcaaattccatttccccctccgccccatacctcttcaaatgtttaaaaaaaaaaaaaaaaaagtactgtacattccttttttcatattaaaatttagaaatccattttgtattttgcatttagagcacatcttaatttagactggctacatttccagtgctcaacaggccacatgtaggtagtggatactgtattggacagtgcagctctagaatgatagattcttggcctcctgagatgttgataaatgctgaatccagaaagcctttttaccatgcatgtaagacataggaggaaataaaatgtaaatacagctgttatggagaatagtacttaaatccattgagtcacttaaatgtggaattaatgttggtcttttcctcacactcagaaaattgtattctggatttagtagtctgaaaacccaagcacagcatgggtttttaagctaacctttctccatttttagccaagtcctttctctctagttagtgaaattttctaagaatagagattcctgcattgtccttttacttcttggcagttttagtccataaatagatatagttaggtttttattttatttttattatttttttttttattaaaagatttggaggctgggcgtggtagtcatgcctgtgatcccagcactttgggaggccgagacgggtggatcacgaggtcgggagatcgagaccatcctggctaacatggtgaaactccatctctactaaaaatacaaaaaattagccgggcgtggtggcgggcacttgtagtcccagctactcgggaggctgaggcaggagaatggcgtgaacccaggaggcggaggttgcagtgagccgagatcgtgccactgtactctggcctgggagacagagcgagactccatctcaaaaaaaaaaaaaaaaaaaaaaaaagagagagagagacctggagtagagattctgtcaaagaactttttctttcttgagaagcatctgaaatggaatctgttgtctcttcgaaatatgtactgctgtaacagtgaaacaaccctcagagtatgccttcgtgtgggctgctcgttgtggttttgaacttgggggaactgtctgtgtttgggtcaagaatatgcaactggctgggcacattggctcacgcctgtaatcccagcaatttgggaggctgaggcaggtggatcacctgaggtcagggcttcaagaccagactggccaacatggtgaaaccccgtctctactgaaaatacaaaaattagctgggcatggtggcaggtgcctgtaatcccagctactcgggaggctgacgtgagagaatcgcttgaacccgggagttggaggttgcagtgagccgagattgcaccattgcactccagcttgggcaacaagagtgaaactcttgtctcagaaaaaaaaaaaaaagtatgcaactagctgggggctgtgacgcgtacctgtagtcccagctacttaggaggctgaggtgggaggatcactgatgctcaggagttcgtgaccagactaggcaaaatagcaagacaccatctcaaaaaacaaacaaaaaaaccagctagttttcttatgcagggggtactctgccaataaagttgagtatgcttatattgtgtttctgttaaatatctctgctacttcaggaattctttatgtgtaaatgttttctgctttttctgggaattaaagcaaatttgttgtgtcaacatcttgactcagatgttcaagtacctttgtgtcttgatttgccttagcatgtagaaaagggacttgtaacattaatgcagatttgaaagaaagattgttaacctcaggcacatcttctgttaatatctaatagtactacttgaaggttattttctgtatttaataaattccttaaaaaggataattttctaataagaagagagaaaatgattgaaacgtttgaacttgaaagaaggctttgcataaaattacagatcatctagatcaatgcctaaaccaaatgtctagacattttagacttaaatgtgcatatgaattacttgggggatcttattaaatgcaggttcttattcagtaggtctagggtggggcctgagatcctgcttttctcagaaccttccaggctatgcttacgcttatattccatcatgttttgattagtaaggggacagacccttattttgttaaggagattgaagcttatggagaaccactgacatgtccagattttcaagattgattagttatagttaagactgtaccctgagtttcttgaagactagttctttttccagtgtactatggtatttccaaatttatggccatgtgttgaaatcttcagctgctttattttcaaaggaaatgcacagtaaagatgacgttcaaggccgggcgcagtgactcatgcctgtaatcccagtgctttgggaggccgagacgggcggatcatgaagtcaggagattgagaccatcctggctaacacggtgaaaccccgtctctactaaaaatacaaaaacaaaaattagccgggcatggtggcgggcgcctgtagtcccagctactcgggaggctgaggcaggagaatggcgggaacccaggaggcggagcttgcagtgagccgagatcgcgccactgcactccagcctgggcgacagagcaagactccgtcgcaaaaaaaaaaaaaaagatgatgttcaaatgtattatatggaggaataggaaatcataaacctatttaaatgtcatttgttttatatccctttatttttgccaggggtatgtcctttttctgttgttcaaagttatattactggccagaatggaaattataggaactagctatgtatgaaattgcatgttttccatccattgtggccaggtttggtattcccttaagatggcaacaaagtaagaggcatttcttctagcacttattcgtgaacccagtgacctccaatttcccattttaaaagtcatctttatcctcggaactttaacctactggcataagaacgtgggcttaagttcttttttatcactttttggagttaaaaaacctctgagaggccgggcgtggtggctcacacctgtaatcccagcactttgggagcctgaggcgggcagatcacgaggtcaggagatcgagaccatcctggccaacacagtgaaaccccgtctctactaaaaatacaaaaaattagccgggcgtggtggcgcctgcagtcccagctactcgggaggctgaggcaggagaatggcatgaacccgggaggcggagcttgcggtgagccaagattgcgccactgcacttcagcctgggcaacagagcaagactccgtctgggaaaaaacaaacaaaaaaaaacctctgagataccttggtttctattaataatattttcagcagtttaatctcaactctgttggcttccctttcttaaagagttaggcagtgatatacatgtcatttagaagtaaagggagggctttagtactgcctgttctgaagtaggagtcttagaaattcagtggcaaactgtataggaagggcctgagtttcatattgtctatattgccttgaaatagccttagtctcctgcttaaaaaggcatcctggaaatcatataaaaagtaacaacaaattaaaatgcatgtgtctgtacctaaggcagctgtaagtggaaatatttttacctcatagtgaaatagaatggatgtattaagaagggagaattttttttcagagtgttttatctcagtgtggctcagaaaagccatttatagggtagggtaatcactagagttgagggttcctccccccaccccccataagattggtatccataaagcagagatttctaagcagtgagagacttcagtattttagattagattcttgggttataatagaataagatcattagtagtagaacatctggtatcagaaaacttgagtgtttttattgccatgttagcatatgaatcttaaaggattacagaattcagttaagagaaacaagcttttattggatgggtatttaaagagtttcttgataagagagaccttagatttcttacgtaaagccatgttcacaaggaccactgtccttgtgattctaatttgccagataaaagtctatgtcctggcgcagtggctcgtgcctgtaatcctggcattttgggaggctgaggtgggcggattatttgaggccaggagctggagatcaacttagccaacatggtgaaatctcatctctactaaaaacacagaagttacctgggtgtggcgacacgcatctgtaatcccagctactagggaggctaaggcaggaaaatcacttgaacctgggaggtggaggttgcagtgagccaagatcccaccactgcacttcagcctgggtgacagagcgagactctgtctcaaaaaaaaaaaaaagttgtcctgtttggaatatgttgcctgctgtctgtaatgtgcactactgatagtgtacagagcatgtggcagcatgaacctccgtagctctgatgtgaagagatgtagtatagtgggtatagagtaggagggcggtttttaagtgatgctcttttagtcttttataagggttttgaatgatttgaaattttaagactgcttttattcagtctcaacttttgtgtatatttgtatttcacttttaaaattcatctcataaaatccactatttggtatcatagcagatcctaatactcaagtttttattctctcccgttctaccatcaaaatcttaaccttgctttgtattcttctagtcttttttctttttctcatatttagaaaataaccgtttggaaaaaatacttactctagtttagtatttttcatgctgtgcctccagctttatgttatggtttaatagtatccctttggcttggggttgggaagatttagaaataagagtatattagatatgtaataagcttgaaaagacatcttgtggaaatagatccttgggaaaacacttagatggaaacaacatttagaactctgtgaaatggaatttactgaaaacttagaggtgctactgttttcctaagcactctacttgtgacagttaagtgtagattgagcccagggctcagcacattagagacttaaggaagaaatcatttcttcaatttttcctctgcagtggtggtgaccgcggtggcttcaaaaattttggtggtaagtgctgagtatcccaaaatgtttcagtggaaatgctatataaatctaaaagccaccaatatcccgcagatgtagtcaaaagtcctttcttactctgttgaggctggtgtgtgttgtgtgctttaaaaaaaattttatatatatatatatacacatatatatatcaaagtaaacattaaaaagccaaagttgatctcaaaacagtccaatgggttttctacacagtgaatttgcatgaaagagtctgtggtgaccaatgaatgacaccttcactggattttgacaatttgttcttataaaggtagctgacatggtgtttttaaattattagggttgtccaatcagcctttacaaccagagcttaacaaaagtgatactagcataatgctaaagtggcaggtgctgtctaggacaagttaaaggaaatgttgacattcatcttgatttcctaaactttaaataaaacataatttatatatttactttgtaaatctgtgatggttgactttcaaggattttggaagtattgacttttcatgccttggtttattactattttttttgttaatgattttaaataaattgccttaaatagctcttttttcttttcttttcccttaggtcacagggattatggacccagaacagatgctggtaaggtttatggtggtttgtcactttgccattaagaaaatgttagttttttttttgatgggaaaagtgtgtgtttggaggggcttagtacaggaggaagatttaatttgatagtgctgccagaactggggagctttatttcttttttttttttttttttttttgagatggagtttcgctcttgttgcccaggctggagtgcagtggcacagtcttggctcactgcagcccccacctgccgggttcaagcagttctcctgcgtctgcctcccaagtaggtgggactacaggtgcgcgccaccatgccctgctaatttttgtatttttagtagaggcagggtttcaccatgctggccaggctggtcttgaactcctgacctcgagatccgcctgtctcagcctcccacagtgctgggaatacaggtgtgagccaccacgcccggctggggagctttatttctaaagaagtgtcagaaaaattcaggagtattgatgggacagtttgctggggaaaattgctgtttgtgctttcccatattctttcttccgtgaagaaatacttgaatttttactgctagttagcattaattatttaaaattattgcaaatcagattaatgaaagaatttatatcattgtggaattagaagtagaaaaactatttaagaaagaaaatcctacgttggattggtagtctgcttaagtgtgctgacttagtgaattcaagaaacctaaattcatacatgagagaattgtcttattttgggtagaggtcactaattttctgtggctttttatttaaatgaaattcaaggctacagatttacctgtggagcctgttgaaagttataatttagaggttaaaaatctatttgagctaaaaatttgaaatcagaacttttgtttttattaagatgccaaagtattctatgtggatggcaatttctgaattatcccttcatggactgaattcttatacatctttctttctttgttgtactaatccaaaagtgtgcatgtcaggtaacatgtacaaggtgcctccgcactctggtatatacaaagcttattgcaatgaatgggaaaccagcagttctgctttgtggcttgcttggaagttcaaagtatcagatttggagaattttgtactagagaatcttaaaaatgtttaaccgtaaagaattagagttctccagagaaagaaatgctaaactaactccatctcttcatgacgtttagccctatgtctgaatctgaagagtgaggtttgtaagatcatccttaattggtatataggtatttcacatagtgtggacttgatccactttacttgaaatttagttgtaagaattgatcaaccaaataattactgtgaatactttgcatgtttatataaggttgttcttatattggtcctttccttttggtcatagaaacaattgaatattggacaataaattattgtctttgattactgaacagaatgtcataaccaaggaatatgtaaaattaaccatcactttttttctcttagattcagaatctgataattcagataacaacacaatctttgtgcaaggacttggggagggtgtgtctacagatcaagttggggagttctttaaacaaataggaattatcaaggtgagtaaaaatattatatgttgaaaatctcataattaatgttctgattacaatacatagactatgtagtaagcctacatacttcagtacgccttgtctcttaaaattttgtgatgcacatgctcgtttatgtctgtagacgtttgctaaatttgttgaatatatgaagattttattccttgcttgtgtttacctttccacagtctacctgtgctttagcttccatcttaggactctaaaattagtctctgcttagttcttataactgtgagaaataaaggagttgctgagaacattttatagactgaaatatatgcaagttcaagttgttagagctcttgggaggggttatttaatgtttatgctagagataatacgttatcttgtaattgctcattgttcactaaagcgtcttttgcactattttcatgcatatgtttttcatctcttcaactagaaagcagccttagtaatgtttagatagtaacagtttcttgaaatcagtttacatctgcccttgttttggtgtctgtggaattactcttttttttttttgagacagaatctcactgtttcaccaggctggagtgcagtggcgcgatgtcggctcactgcagcctctgccttccgggttcaagtgattctcctgcctcagcctcttgagtagctgggactacaggcgctaccacgcccagctaatttttgtatttttagtagagatggggtttcactgtgttggccaggatggtcttgatctcttgacctcaagtgatccgcccacctcggcctcccaaagtcccaggattacagtaggaatgagccaccgtgcccggcctactcacttttttctttctttgggagttataatttgttaaggaattaattacacacaaaatatgtaattttgttgttgtcgttgttgtcttgagacagggtcttgcttcattccatccaggctggagtacagtggcataatcatgggtcactgcagcctcaatctcctgggctcaagtgatcctcccaactcagcctcctgagtagttggaaccactaatgcatgtcctcacacccagctagttaaaaatttttttttttagagatggagtctccctattattgcccaggctggtcttgagctcctgggctcaagtgatcctcccacctcagcctcccaccaagtgctgggattacaggcgtgatccaccatgcctggcctaaattcacagagttttgaaaaagtaaaattctcccttgtcttatcccagccaaatcccagtgtaacgttttagaagttacatatttacggccgggcgtggtggctcacacctgtaatcccagcactttgggaggccaaggcgggtggatcacaaggtcaggagatcaagaccatcctggctaacacgatgaaaccctgtctctactgaaaatacaagaaattagatgggcgtggtggcatgcgcctgtagtcccagctacttgggcggctgaggcaggagagtgatgtgaacctgggaggtgaaggttgcagtgagccgagattgtgccactgcactccagcctgggcaacagagcgagactccacctcaaaaaaaagttacgtatttacatgaagcattatctacatttaatttctgtggatttaaagaaattataaactggatgtggtggctgattcctgtaatcagcacttaatcacagcactttgggaggctgaggcaggaggatcgcttgaggccaagggtttgagaccagcctgagccatatagcaagaccccatctctacaacaacaaaaaagccgggcgtggtggcacttgcttgtagtcccagctactcgggaggctgaggtgggaggatcacttaagtccaggaatttgaggctacattgagtatgatcgtgccactgcattccaacctgggtgacagagtgaaaccctgtctcaattaaaaaaaattatacatagataaaacagtatactatatcatttttatagcttggttttcacttagtgtagcttagagagttatgcttgtctaaacctacaggtaacttattaggtgcatagtattttatagtatgaatgtgtgaattccttgtaaaaaaaataaatctttgattatctaaatgatacatgattacttattttaaaaatgctaacaccaagtgtttctgtttttcctcagacaaataagaagaccggaaaaccaatgataaatctttatacagacaaggacacaggaaagccaaagggggaggcaacagtgtcatttgatgaccctccttcagctaaggcagccattgactggtttgatggtatgcctcattcgtatagttttcagcatgaagttggataaatgttttctagtctgaaagtgagaatatgctctgggtgacagtgattatattcatgtttacttttgcagatattaagaatacaggtcagaatttttatgtacctttagaaatgagatgagctctatcgttgttggtctagcatatttcgttatatcatgccttgtgcatgaggctaccctgatacagatgtagagagttggcctggttgacagtatgttattttttctttttaaaaaaataaatttaaaaggtacagagatggcattttgttacatggatatattgcatagtggtaaagtctggggttttcctgtatctatcacttgaataatgtacattttacccattaagtgatttctcatcccctgactttatagtttgaaatttaggccaggtggcattgcttatgcctataatcccagtgctttgggaggctgaggcaggaggatcagttcagctcaggagttggagaccagcctgggcaacatagagcttgcctctactaaaacaaaaaaaaaattttttttttttttaaataacctggacgtggtggtgtgcagctgtggtcccagttacttaggagtctgaggtgggaggatcacttgggcccaggaagtcgtggctgcagtgagctgtgattgagtcactgtgttccagcctgggcaacagagcgagaacctgtctccaaaaaaaaaaaccctataaataaataaagtaaaatttaggctaatttcccttcaaatataaagttaatacatacttagaagaaatagactttttttttttttttttttttttttttttgagacggagtctcgctttgtctcccgggctggagtgcagtggcgcaatctcggctcactgcaggctccgcctcccgggttcacaccattctcctgcctcagcctccccagtagctgggactacaggcgcccgccaccacgccctgctaatttttttgtatttttagtagagacagggtttcaccatgttagccaggatggtctcgatctcctgaccttgtgatccgcccacctcggcctcccaaagtgctgggattacaggcgtgagccaccgcacccggccgagatgctttttttaacagaaagtagaagaaatgagtaaaacatctctatagccctctactcaaaggtagccactgataatatttcttaataattttccttctggtgttttaagatgtatcttgtaatactccaaatagagttttgtcttacggtatttttcatttaacatttaaaggtagtcatttccccatgttacaaattcatcatttttgttgcaccctaatttaacagtaactaacacttactgcatgtttactgaggtttatgagctaagcacaactttaagagccttacacgcattaactcaatttaatcttcataataatcttatgagacatatgccctgttactcccgttttacagagagtgaaactgatgcatagagaaactaagtaatttccaggatcatagagtaagtcgcagagtcaggattcaaactcagccgtgctggatctactctttccaaagtacttaactatgctggattgacaaacacttgcagttcctttcagtttcaagattattgtacctccatcttccaaaaacataattgcgttattttccttttttttttttttttttttttgagactgagtcttgctctgttgctcaggctggagtgcagtggcgcaatctcggctcacttgaacctccgcctcctgggttcacgccattctcctgcctcagcctcccgagtagctgggactacaggtacatgccaccacgcccggctaattttttatatttttagcagagacaggggtttcactgtgttagccaggatggtctccatctcctgacctcgtgatccacccgcctcagcctcccaaagtgctgggattacaggcgctcaccaccgcactgggccagctcttttacttctttaaagatgagattgtaggccaggcgtggtggctcatgcctgtaatcccagcactttgggaggctgaggcaggtggatcacaaggtcaggagttcaagatcagcctggccaacatggtgaaatcccatctctactaaaaatacaaaaatcagccaggcgcggtggtgagcacctgtaatcccagctactcaggaggctgaggcaggagacttgcttgaacccgggagttggaggttgcagtgagccgagatcacgccactgtactccagcctgggtgacgcacagcaagactccgtcaaaaaaaaaaatgaaattgtagtaccctgtctgtccccgtctctgtattctttacttttttagactaatttgtcagacttcatcaccttgctcttgaaggctaagtccattctttcttactttgctgctttcataagaatgagagaaatgaatcatgaagctatgtcttttgcatatggtatattcagaaattatagtgacttttgcccatagggcatatgagccttttaaacctaactccatagttcaaatcttgccaattcttatttactactattttttaaaaagttaccaattgttatattactttggaaatgataaaaaaaatttcaaatggtaccaagggcatatggtaaaatatgagtttctttttcacctttgaatcccagtgatcttgtgtcccctagtaagcacagtaggcaatgcatataagcatatgtgtagataaatacgtacatgttactgcacttgcgcacgtattcattcccttaaataaacaaatggtaccatacttcacatattctacagctggctttttttcccatgtaaaaatattagatacaggttttagtttttttttccccatgggaacaggtagacatgtgcacctgactcttttttttttttgacttgctgggcttaggtgatcctcctaccttagcctcccaagtagctaggaccacaggtgccaccacacccagttaatttttttgtattttttgtagagacagggtttccccatgttgcccaggctggtcccaaactcctgagccccaagctttccttggcctcccacagtgctgtgattgcaagcttgagtcatcacgcccagcttttttttttttttttttggagagagagtatcacactgtcttccaggctagtacacagtggcacgaagatagctcactgcagccttgaattcccaggctcaagtaatcctcctgcctcagccttctgagtagctaggactacaggcgcatgccaccatgcctagctaattaaaaaaattttttcagagaaagggtctcattacgttcctcaggcttgtctcaaactcttggcctcaagtgaggcttctatctcagcctccaaaagtgctgagattacagatataagccactgcacctggcctttttctccacccctgacaccatctccttccccaggctggtctcgtgctcctggactcaagtgatctcccacctcagcctcctgagtagctgggagctggtgctacagacacataccactccaccttgttttttgtttttgttttttttttaagcttagtaagaagtgactgtctcccagtgacagatatgctcttttcagtagataatgtcacttttagcactgttatcttgactctttgcatttgaatttctgtgaggacatgtcagttactcctctgaaactaaagatttccaagactttttcatttttgttgacaggtggaggtatagagtagcattgcttcaaagctgatttcttttttcttaggaaaagaattccatggcaacatcattaaagtgtcctttgccactagaagacctgaattcatgagaggaggtggaagtggaggtgggcggcgaggtaagatccttgctgcgtacagtcctggatactatccaagggtttaagtttgagttcatactctgtttctatttgtgtgaacttgctactgctttttctctcgctaggtctttttccctctatcttaaaatgagttcaggtactgaatatattaggtaaatgagatatcgtaatagctaagaaagtagtgggaaatggttgtagaaatccctttggaaagctttattgtgatttgctgttcacttggaaatcaggaggcaattttttttttttggtttttgtgtttcttttgagatggtgtctcactctgttgctcaggctggagtggagtggcgtgatctcggctcaccacaacctccgcctcccgggttcaagtgattctcctgcctcagcctcccaactagctgggactacaggcgtgcgccaccatgtccagctaatttttgtatttttaatagagatgatttcactatgttggccaggctggtctcaaactcctgacctcatgatccagccaccttggccttccaaagtgctgggattgcaggcatgagccaccgtgcttggcgaggcaattgttttaatgatacctaattaggtaattaatctgaccagtttttaagctgcctgatacagttactgccagctttttttttattttttatttatttatttatttttgagacagagtttcgctcttgttgcccaggctggagtacaatggcgcgttcttggctcaccgcaacctctccctcccgggttcaagtgattcgcctgcctcagcgtcccaagtagctgggattacaggcatgcgccaccatgcccagttaattttgtatttttagtagagatggggtttctcccatgttggtcaggctggtctcgaactcccgacctgagatgatctgcttgccttggcctcccaaagtgcttggattacaggtgtgagccactgcacccagcccagcttctttatttctattggattcatattcttgtcttttttctttttctgttttgtgggtggatgttactgtggcctttgcattcatattcttacatttggagtttttgtcttctcacctaatcttcttcatggagattctcaaactaagtagggtataggttaggcatcctaagtttgaaaatctgaaattggaaatgctctggaatccaaaactttgagcaccgacataatgctcaaaggaaatggtcatggtcattgaagcatttcaggttttgggtttttggatttgggctgctcaactcgcaagtataaggcaaatatttcaaaatctgaaaaatccaaaatcagagacacttttggtcccaagtatttgggggaagggatactcaacctgtattacagaaaatggactttgaagttttctagtgcattatttgcactgtgttgtgtgcctagggtctgttttcaaggtcctctgtttactaagtacaagacccaaatcaaagaattacaaagtcctggtataaggggttaatttgcagagtgctgcctaagtattgatgggtatctactcttatgttatctgatgcttttcttctgttttgttaatatctgctgctgatttttctcccctggccccatccccctaggccgtggaggatatagaggtcgtggaggctttcaagggagaggtggagaccccaaaagtggggattgggtttgccctaatccgtaagtgtcttgtttactttggtgagagtaggggttgggattggggctgtggaggatacagaaaggggttctgagtccattagaaactatataggagcattatattttcctcctttcttaggtcatgcggaaatatgaactttgctcgaaggaattcctgcaatcagtgcaatgagcctagaccagaggactctcgtccctcaggaggaggtgggtcagccttttaatagcatctgcatcgtgcttatcttctgactagcattaagggggctttacgttgtttctgctggcctcattgtttgcatttctaccttgcagatttccgggggagaggctacggtggagagaggggctacagaggtcgtgggggcagaggtggagaccgaggcggctatggtggagacagaagtgggggtggctatggtggagacagaagcagcggtggtggctacagcggagatagaagtgggggcggctatggtggagacagaagtgggggtggctatggtggggacagaggcggcggctatggtggggacagaggaggcggctatggaggagaccgaggaggtggctatggaggagatcgaggtggctatggaggagaccgaggtggaggctatggtggagaccgaggaggctatggaggagatcgaggaggttacggaggagatcgaggaggttatggaggagatcgaggaggctatggaggagacagaagccgggggggctatggaggagaccgtggtggtggcagtggctacggtggagaccgaagtggaggctatggaggagacaggagtggtggcggctatggaggagaccgaggtgggggctacggaggagaccgaggtggctatggaggcaaaatgggaggaaggtgagtattagaatgtgtttattaacctttttacctcactgcacctagattgggggatttgaaccacattttaacaattttttggaacttgaatttcccattgccagttctctcaggatggagaagatgatttagtttcctgcttagcaatttctaaaattttgttttggaactttttattttttaactttaatttttattttttagagacaataaaaattaaatttagtgacagagacagggtcttgctctgtcatccaggctagagtgcagtggtatgatcatagttcattgtaacctcaaactcttagactcaggcaacactcctgcctcagtctcccaagtagctggaactataggtgtgtgccaccacacctcgccaattttttttattttctgtagagacagggtctcactatgttgcccaggctggtctcaaactcctggcctcaagcattcctcctgtcttggcctcccaaagtgtttggattacagatgtgagccacagcacctgctggaaattctttgcagtggcgcagtctcggctcactgcaagccccgcctcctgggttcacgccattctgcctcagcctcccaagtagctgggactatgggcgcccgccaccacgcccggctaattttttgtatttttagtagagacggggtttcaccatgttagacctcgtgatccacccgcctcggcctcccaaagtggtgggattacaggcgtgagccactgtgcctgtccacctgctggaaattcttattcataaatctttatttgtttcggtgtatctgtgtattatttttttctcataaagataattgagattgagagataataacttgaaactgtgtaaatcaagagttcctaatctaagtgaaggaacatacctttcatagggtggttctttttcagatcatatatactaccctgcagttgtttttctggagatactgataacttttccagatgaaaaccactgatgggaatgtcttgtgcacacgaatggtgtagaggcagaagaagaccaatgatagaaagtaacttcaattattatactaaggacctgtatgccagcggcaatataaggcagtgagaattagtatagaatatggttaagagcataaagttgggaagcagactgtctgggtttcaatcctaactctaccacttattagctgtgtgatcttaggaaagttacttaatcctttggagtgtcagtattcttatctgtaaaatggggctaataagacgtcctttttagacttgtattagattacgttgtactagttgctggcccagagtaagcactatataatttttagctattagtaattatgagtaacctaattaccatctattgaacactgcttactgtatggccaatactgtaaagtgttcttatattctttagttctagtccttctgtcattcctatgaagtaggtatacttcccattttacagagtcagtcatttagtgtaacttttccaaggtcacatagtaagtggcagatccagaattcatacatgtaagtgcttgctcattccactatgccactctcctatttagagtgctggaactgggacagtttctgatcttctgaaatatttgtggtttggagttttaagtggaaaatttttaagagagtgaagcaaagcttcttctaggaactttgtgaatcttaaagctggtaaattagacatttaagtatcttctaggagtacagaaataaatgaggcatggtgtcattctttagaaattgtctagctgatgccaatcactagtaccctgaagaagtgtctaatgctcccccttcgtagaaaattagaatttagtccggctctttatttttcattcctagaaacgactacagaaatgatcagcgcaaccgaccatactgatgactgttttgaatgttcctttgtctctgacatgatccatagtgaaattgccagagttttgcctgctgctttcctcgtggcctcttcttgggtagtgaaattaagtgacatttggatttttatttgggtgggagggctgggacagtttttcttctagaaatgtctgttgagatttccccctttagtttccaaccttctccccaacccttggagctaaatgcgttgtaaaatattgccaaaatgaaaagtgttttgtaatactgcaataaaggctgcttgtttttgtggacttttgtacatactagtgcattgttctgtcacactcaggactcagttacattagactctaatcctaaagaattaggaaatgaattatatacttcagtaaattaaaatgttactttaaacaatatttattgagctcctactgtgtttagtggttcccaggaatgacaagtcagaatcacctgaagtttgttaaaattagattcctaggttgttaaatttagattcctagattcccagccctctaggtctgctggatcagagctcaatgaggtatggggagttagggctggaaatacttatttagctcaagtttaccaggtgattttgatatagttatttagtatcacttgacaacgatttatttaggggagtgttttagatgctgggaatatgaagttccaaggaaaagaaaggatttacaagccagggttaagatggcaacatatgtatgttatttgctgtttattagagaactatttattctactcttaactatgggtaaggcactggatcagattctagatatgttgctgaccaagtaaacagaaagcatagtcgataagtgcaccagtaacaagttcaaggtgcttagagggctgatttgaaggacactaaatttagtcacatgggagtagggaaaggcgaatgtggagggaagactaggagttcactaagtacagaggctgagaaaatagtgttcactaagtacagaggcaagaagatagtgttcccagaaggaaatgacatgaacaaatcaggagctaagacagtggggagcaggatctgcacttgaggagaattgtatgtagttctttgtgactgaagggaagagttcaagggtggtcacgcaaaagaaaagattggagaggtaaacaagctctgtgacaaggtccttgcatttcactttttacctccctccaaacagggagtcattaaaagatggtaaatgggtgtggcatgatctgatttgagtggcatcggatgatgattatgactgccttgtgggaaggctggactggagacagccaggtaagggattatattggcctttgaggctcagatagtgactagagggaaggagataactagatttgaaaaatcaagagggaaatttgacaggatttagtttgatgtcagaaatagcggagaaggaagagtctggtttctggcctgcgtgattgggtagatatgttgttcattagggaaggaacagctttgcaggcaagatgggaattaattctgttttgaatgtgttgagttcagagtgctcatgaaacttctaggtagagacataattctgcagctcagaaagtagcatttaatgccatgttcccctgattatctgccttactgaattacatgtctgccttctcaacttgacctctacatgttggaagtttctcggggctttttctaagcccctttctcttaatcacttttatcctgggcaagcttatccaggatatggctttaaatatcatctaatatggtgatgcctaccaaatttacatctccagtcctgagttctcccctcccagttgcctacttgacctttgcagttggatgtaaaataattgtgtttaaaaaaatgtggactgaatagaacttttgagcttcccttccaaatgtttcttcctagtgttcctaacctccaaaacacatctgtgaatgagacctgggctttttttttttttttttttttgaaacacagtcttgcactgtcacctgggctggagtgcagtagcacgatcttggctcactgcaacctccgcctcctgggttcaggtgattctcctgcctcagcctcccaagtaactggaactacaggcacctaccaccaggcccagctaattttttgtatttttagcggttccgctatgttggccaagctggtctcgaactcctgacctcatgttccgcccgcatcggcctcccagagtgctgggattacaggcgtgagccactgtgcccggaggcttgggcatgttttaaaagagccccaggtgattctagtttttggagacaatatatggaaagagaagagcctaggaggaaacttggagaaatactgacatttaacagatgagcagaagaggatcctaaaacagactagaatgggaatggccagtgaggcgtggtcagtggaacccaaaggaagaatgaattttaggaaaggagaagctaatagtatcaagtacttaagccaggctacctcatgtaaaggatagaaggcattcattacattgagcaacatagttacacattattttagcgcagggtttgatactgttgatattttgggttggaaaatgccctgtgggatgctgccctgtgcgttgtaggatgtttaatagcatccctggcctctacctactggatgccagtagcagcccttacctctccatgttgtgacaactaaaaaatggcttcagatggccactagggggcaaaattgctccctgttgagaaccactgccttagcaaaagcaatttgggcagacaattgaattctgaactcaaactgcagtgggataatagaaatgcataatagaaagttaataaaaattggggaaatggatacggggaatgtggacaaagaaatttgattatgaagggtagaggaggcatgatgtgagaggaggaggtagctagatggggatacttggcttgtggaaggttatttttaagatggtgagaattgagcatgtttatacatgaataattgatgttcaagtctcttgaaggggtggcgtctagaaggtcggtgaaggatttgccttagaagaagagaatgcctcttgcattgcagttggaggtaagaataggtgtggatgctgatagtagtaaaaacgactaacattaattgggagcttactgtgtgccaggcactgttataagcagtctatgtgtgttatctcatttaactcacaacaatcctttgaagctaggagataccggaaatacttcacagaagaggtagatggtgtaaatgattttgaatgccattgggaaggggctttttagggggtacagtaaggaacagaggcactgagagattgagcaacttgcccagatcaaatctttagtaagtggcagagccaggattctaacctaggcatctgccttagagcctgtactcttacctactctcgtgctataaacaaggatgcgtatagccgaggtggcaggaggaagttgaggtaattccatctgatgtctttttgttttcctgatgagaaagtataatagtctgcagagtttggggaagtaatataatagaagggtttttttttttgttttgttttatttttttgagatggagtcttgctctgtcgcccaggctggagtgcagtggcgcgaactcggctcactgcaagctccgcctcccgggttcacgccattctcctgcctcaacccctgagaagctgagaatataggtgcccgccaccatgcccggctagttttttgtatttttagtagagacagggtttcaccgtgttagccaggatggtctcaaatctcctgaccttgtgatctgcccgcctcggcctcctaaaatgctgggattacaggcatgagccaccacacccggccgaaagttttaagagattgtaggatatgtgaggttaggagagaaggcttgacttataaccactgtggggatcagggaagtgtgtgcctaggaacccataaatctgccaggtgacaataagggctcagttaaagtaggaggtaagcaggccaggcgcggtggctcacgcctgtaatcccagcactttgggaggctgaggtgggctgatcacgaggtcaggagattgagaccatcctggctaatacggtgaaaccccgtctctactaaaaatacaaaaaattagccaggcatggtggcgggcgcctgtggtcccagctactcgtgaggctgaggcaagagaatggcgcgaacccaggaggtagagcttgcagtgagccaagatcgcgccactgtactctagcctgggcgacagagtcagactcctcaaaaaaaaaaaaaaaaaaaaggcaagtatttgggggttccagtctgtatggatatgtgatttttcaacagctttgatagcaacgtggttataggggcagaggcagtttgatttagagtaggggttttactgatcagagatgatcagagatgacaaaagtgagggtagtgattaatggatgggatccaggttgagtaagaaaaaaagagggaggatggaaggaagtcaggagcttagtgttggtgatgagattcaaagaacttgtgtggataataagagctgcacagattgaaggttgggtcagaaagtgagaagtgaacattttggagatagagcaattcctagggatgacaaaggttaggtgtaacgttggaagtgggtagctgaagtgaatggaagggaaatgtctttgtaattgagatgaaggactgaggggctggagtattgaatgtttgtccaaagggatgccatcagagaggtgacaaagagtcaggcaatgaatgagaggaaatggagaaatggaccagtgggtaattgctggttggtgagcaggatcctcagagaaacactgattttctttttcttttcttttctttttttttttttaagatggagtctctattgtccaggctggagtgcagtggcaccttctgggttcactgcaacttctacctcctgggttcaagcgattctcctgcttcagcctcccaagtagctgggattacaagtgcctcccactgcacccagctaatttttgtatttttattagagatgggattttgttatgttggctggtctcaaattcctgacctcaggtgatccacccacctcggccttccaaagtgctgggattacaggtgtgcgccaccatgcccagcagatttttctttttattttcttcattttttatttttgagacagagtttcactctcgtccaggctgaagtgcaatggcatgatcttgcctcactgcaacctccccctcccgggttcaaatgatcctcctgcctcagcctcccaagtagctgggattacaaatgtgttccaccacatccagctaatttttgtatttttagtagagacggggtttcaccatgttggccaggctggttttgaactcctcacctcaagtgatccttctgcctcgacctcttaaagtgctgggattacaggcgtgagccaccacgcctggctgaaacactgatttttatataaatgtgcaaaacagtggtgagccaccacgcctggctgaaacactgatttttatataaatgtgcaaaacagtggtgatattgggagggatttaggagaatcagcaacacctgagcgatttcagaaaggggcccagtcaatagccagttttcagttacagcctgaaagatagatgagaaggtttgagggagagagtggagggtgtgaatgctttttgtttgccatcagaagaagcatccagagatcccattagaaaggtttgggttagaggagagaaaagagagggacttacattttgaatagtgtctaaggatcagtcccagtaactgagaccagtgggtgtctttggactatgagagaagccagcgactgcttggataaagtagacttctaagagtgtttgatctaggtagctttggtactgggagggctctcgtacattggtggtgtaccagatggtgactgctctgtgaaaacctttatgcccctcactgccatcttgtcttctggtggggactggtgaaattaggattgaggtgctactaggcagatatttgtatctggttgaataataagacgtcctctggaaatacctaaaaatatggaggtggagtggttggggatctgtgggcaggattttgcagaagttgagtttgaattatgtagttagtaaggtcatgttttgtactcacaggcttttgaggcacagggaaatttgggttatgttgctcatggacccaaagcagtggagtgggcaaaagaggaacatctttcctatcattggactttggcatcacaatattagaggggtccccaggcagtgctgcatacactcaaaatagtgaaaccacccttggtttttacttacagctcgctcacaggcaaaacatgaatctagaagtgatggggtaggttgggagataattctgagtgacacactatacaggtttagtatcccttatccaaaatgcttggaaccaaaaatgttttggatttcagatttttttttcagagtttggagtatttacattatacttacaggttgaatatctctaatccccaaatccaaaatgctgcaatgagcattttctttgagtgtcatgttggtattgaaaaagtttctagttggagcattttggattttgggattaggaacgctcagcctgcactgaattcagaataactgttgggattactgtagaacctggggtgcggggaagtagaaaggagcgtctgttttattttgacttttctatgcttgaggggaagaacttgacctcccagtaaatcagtaggattgggggaagaagaggaggtgaaaggagacagtcgtttttaacctctgatggtcagaggctcacatgacaacattaaagaggaaaggagagaaaagttcatatttgattgtttactatgtaatgacaggcactgttaacctttatggtaatcctcataggagctttctgaggtaacaggtattattattttcattttataggtgaggaaacaaaatcacaaaggttaagtattaacttttaataataataacttgttcaaagttaaaagtgattaactggccaggcgcagtggctcatgcctgtaatcccagcactttgggaggccaaggcaggctgatcacgaggtcaggagatcgagaccatcctggctaacacagtgaaaccccgtctctactaaaaatacaaaaaattagccgggcgtggtggtgggcgcctgtagtcccagctattctggaggctgaagcaggagaatggtgtgaacccgggaggcggagcttgcagtgagccaagatcgcgccactgcactccagcctgggcaacagagcgagactccgtctcaaaaaaaaaaaaagtgatgaaccttaggattagatatcagatttgtctgactccaaagtctgggcctttccttcctgataggggttgtagctttttggaattggtgtggtaggtcctgttggcaaagggaaactaaagcttcagtagaaataggggagaaattaaggcagttttagagaataagaagggtctttcaaagggaatgacctagagagtaaatagggtctttcaaaggaaaggatagaaagcaggtacctagattgaagaggcagcagagaggatggttggttctgattaaagcttaattatctcctgaccactggtaggaaggtggggggtgagggcaagttagtaagaggacatgatccaagctttccagcattttctcctagttttctgtctctaggcagactcttctctagctttgccatcaaattctggacacagataagcacttgatttagggaggcaggctggccgtccagagaagctttggctctgtccttccctccttcctctggtagaagggcatgtggctgagtggaaagtatacccaggtaggaatgaggagacctgtgttccagtggagcttctgatgaacagaagtggcagtagtgattcagagaaatgtggtaggtagagtgacacttgtttattcacggaagataagtatagattgttttctcatgggagcctgagaagcatcttcagggagggagtcggggagtaggcccaaagaattgacttatttggcaatttcagcaaggacccggagctgtttcttgatccttggctgccagggccctatgacctgtggcctatgttttcgtggtttcgagcagcacggtgggaaagcaggcgttttcttttggcctactttggtgatggactttgcaataaacaaggggttcagctttgcaagtcgaaagtcttgaatagttaactcttctgggttctcaggctctttctggaaccttgtgggctctgccttcacattggtcttaggtgcctcatatacagagagaaccttgtttttcagcttgttttggatccagggatcaattgaggcacaaaggattaatgtttcttgtagctgcattgaaacaaaggtcctagtgctggctcactttgggttcaggctgggaggctccagagagggggcacccaaagtaggggggaattctagccacagggcactgtggccccaaggaacaaggtcaagggacagtgtctaagggctcatgaccctctcctcctgacaaggagcaaatggtggtgagataggtgggagaagcttgaaggagggctagagaagaggaagaagtgggcaggaacgccttacttacactcttcttcacagcctggtggttttctgcatctagtaagtccaggagcaagtggaacacttgtggactgcggatccccaggacaccctggcagaggcagagtgagagtgcctatgtagccagccccaggaagacaccttatactctttcccattctagcccctttgtgagactctgcagcatagagaggggggagatagggtttcccagctgagatactcctttccttgccatttggaaccactgcatgggactttaatgcccattatttgctaggaagactgaagacaatttctgcagcatctaagcaacacccctcacatcaatcttctgtcccttagcccacctacccccaaccctgaagaaaaggttcggtagggctggaattctaaaataaacaacttccccgaagtttacaggcctttattcccctcagtgactctgctcaatcgcctactccccctgccatcaacacaggaattgggtcagagaagcagagcctgccttaccaaagagatgactgcttcctggcgtgcagtggcatctgggttcatcagttgtctgtgtagaagggagtgagtatgttatagttgaattaaggagtaggggaagtggaagggaggctggttgcttttcaggtccagagcgaattaggcaaagtgatgctaatttcattcatttccttctcttgtttcttggatcagaaaaggggcagggagaggaaaaagaggcaccacagtttgccaggaggcactgaatgatgatcaggactgtccagaaattttatctttttaaaaaaagttcttttcatgtcataatttgagctttatagcaacctatacctaaccttggtaggtattattactctttctttacagatgaacaaaagctcaggggtcaaagagttacttggttaggggcatgggcaagggagaactgaggacctgctgcactgtaggttctcagctctcactgaccctctgaccccttcccactgaccctctcactgaccctctgcccccttcccacagcctaggatttggccctggcagctcccaggccactcacgcctccaccaagttcatcatcgtaggcttcaacttgagctcttccacagtttgagccacagcctgcctcacagcctgcagagggatcaaaatgagtcaacagagagagggaatgcaagggtgtacacttaagagcctctcaaatctttactgaacatttcctttgtgctatgtagagtccctgccttaaggagctcatagtctggtggaggaagcagacaggtaaataggcaattataatactgtgtaggggtacacataggagggtctcctaactcagtcttgggtgccaggaagacttcctggaagaggtgatgcccgagctgaatgaaacttggaaggtgagtgggagttaaccaggcagagggttggggttggtcagattttaagagcagaggggagagcatattaaaaaatctggaggcaggagaaggtgcagagaggatggggagctgaaaatagttcaactcagagaggtgaccaaatggactcttccaagcactctgagtgctctaattaccctgggacaacaggtataaatcaggacatggttgtcgtaagcatagttggtacatggttctggtggggagaatggtgagagatgaagctagagaggcaagcaggcttgagctgtggaagcagcataagccatccacagggcattgggagccaatagaaagttttatgcagagaaggcacaatctgatttatattttttaaaaatgtctttagaaatataacacctagggccgggcgcagtggctcacgcctgtaatcccagcactttgggaggccgaggtgggcagatcacgaggtcaggagatcgagcccatcctggctaacacgatgaaaccccgtctctactaaaaatgcaaaaaattagctaggcgtggttgcgggcgcctgtagtcccagctactcgggaggctgaggcaggagaatggcgtgaacccaggaggcagagcttgcagtgagccaagatcgcgccactgcactccagcctgggcaacagagcaagactccgtctcaaaaaaaaagaaaaaaaatataacacctagttttataacaagctatagtaaatataaaagcaagggaacatagaggaaggtagggttaatgctgattggtgatttgggaaagcttcccataggaggtatcgttgggatcggtcttgaaggagcaatacagtatttttagtaggcagaaggggagacggattacttactggtgcgagtgaatagtatgagacagttttttaccttatagaaggaaggatgactcagatcattttaacctgagtgaactgcctgagcaaaggcaaggtgatataaaaacctgggctgcattagttgaacaggagtaggtcaggatgaatgtgatacttcggtggaggccaggggaggtctccagaacacggaaaagagaaaggtttgggtgtctctgggcttgggagctttggtctcacttacaaggaagggttcattatgcgtcttcctcctgagcaggttaaatgtgagttcctctagcccctgtgcctggatctgttccagcccaatggtcttgagcatttgggtggcttcaaagcggtcctgaggtcgggggtgagggttagtggggaggtgtgaaagatggattcccttcttcatcccctaaccctatcctagtgccgggaaaggaagggttcaggcagtccagagcttacctcaaggacactggaagaacacagctggtctaggatggccttgatgactggggctgagtgcacgtgcatcaccttgaccagcatcctaagtgcctatgagggggcagggtagggcagggtgtacagggcctagaggcatctgtgtggccaggtggacttgaggtctgagcctagaactggtgaggaacagctaaggtccttttttctgcctcttcgcctcttgaccacagaagttcatgtgtgcatatacataaatgaacacccacacctatcaaatatacacagacacatggacgcttatatgtccatatgaccccatactcatacatggacatagtcataagcacacagaggatcctgcagtgctccaccaccaggatggcaggatccagaccacacacaattcagcagtggcttctgtttccccagggatcccagcctcctgcccctcacaccttcatccgctgggtcttgagtccttggcacaggcactgcaacaagaactcttggaccatgttgctgcaaggcctcaggaaacccaggcacagggctgcctccagagatgcttcactggacgacttcttgatcagtgtctgtagtacaggcaccagcttgccctcatccccgacttgagtcctctgtgagggagacaaaatggctaaggggaggggctatgtactttatgccaggctttgtgcttccagactatattcaccttcctccctaaaatgaatcttgtgcatcagattatttcaaccaattaacttattcttgctgtcacctacttgcttctaggtcagatctcatttctctataactatctcatggatggatcactgttactctcttcaacacttctgctgtgttaattcctgtcatttaaaagaatatacatgtgagtgatcccatacctctcctccaatatccttgtcctcttctctgcctcagccactaatcccactgagagacctgatcattacccacaaatgcagcttctccataatctccatttcatggatcccactctctgaccatcacctctttttccagctcccgagtccaagaattgtttgactccacaagggactaaataatccattgagcctgccacctttgcactcctccacacctctgtccctcttgacccagcttaaattccatgatcctgctgtaatcactccccttcctcaccctcagctcccttacccactcttgcttcattctactccctggacagaactacagtccaactctctactttgtgccagcacttcctggagaaaaacactattgcagcgaatgatcttgttaaaatgtgtgagcacagacctcatatagacccttaatgctgtctggtaatcatactgtttttccctgggcagttctctttctcactcttccaattcacaccctttctggaacacttcttcctctattcttactcttggctagtgaccttgctttctacttcagtgagaaaatcaaagcaactagaaaggaagttccatagactcctatgactacttttgtccagcttccaacacttgcacccatacacccttcctttctacttgttaactatagactataaccatctatctaaggccagtctccacttgtgtcttagaccttatctcttctcgcctatttaaggacatcatttaagaacattgctatttttcggccgggcacggtggcttacgcctgtaatcccagcactttgggaggccaaggcgggcggatcatgaggtcaggagatcgagaccacagtgaaaccccatctctactaaaaatacaaaaaaaaaaaaaattagctgggcgcagtggcagccgcctgtagtcccagctactcgggaggctgaagcaggagaatggcatgaacctgggaggtggagcttgcagtgagccgagactgcaccactgcactccagcctgggtgacacagcaagactccgtctcaaaaaaaaaaaaaaaacaagaactttgctatttttcacactctcttcaaagtccttatttttatttatttatttatttatttatttattttatttatttatttatttatttattttgagatggagtctcgctctgttgcccaggctggagtgcagtggcacgatctcggctcactgcaagctccgtctcccggtttcacgccattctcctgcctcagcctgccaagtagctgggactacaggcgcccgccagcacacccagctaattttttgtatttttagtagagaccgggtttcaccatgttagccaggatggtctcaatctcctgacctcgtgatccactcgcctcagcctcccaaagtgctgggattacaggtgtgaaccaccatgcccggcctatttatttatttttgggaggtcgaggtgggtgaatcacaagatcaggagttcgagaccagcctggccaatatggtgaaacctcgtctctattaaaaatacaaaaaaattagccgggcgtggtggcacatgcctgtaatcccagctacctgggaggctgaggcaggagaattgcttgaatccgggaggccgaggttgcagtgagccgagatcatgccactgcactccagcttgggtgacagagcgagattcggtctcaaaaaaaaaaagaaatggttacagagattttaaagaagcatcctcttgtccacatcctcttgtaactgttgtaccattttctcttccaactgcttccctttgcctgcaagaggggctcggataagatggatgttttgcttgacttctttgatatcctgaactttctgtagctctttatttttctacaatctgttcgttataaatttagcttgacgtttctgtttgatctcttcaactctcttcattgcgtcaatagttttattccatagctcttgctagtatttgataggttcatttctatgtttttaaaattcaaatgaattatccactgtaagctctttaccagctgctttccggaatgctttggtccacctaactttgcgaggattgcgcttctttttaaagtttctatgacacttagatttacaaaatctgaacaccttgcagtcgttgcggacaaacatcatgtcatggctggggtagatgggcctcgaagagaaataacacttcttgatacgcatgttgaacctgtgttggtcccctttgctttcttaaccatgccaaacatactcctccctttgcattggtccttctgcctggaatgtcttctctcagatatctgtaaggctaacccactcactttctttatgtctttgctcaaatgtaccttctaaatgaggccttccctgtctactgtatttaacattgcaacccatccctactcctacttgtcacacctgatcactcttaccctgctatgtaattgtttccattgtacctgtcacctctaacatactacataattttctttttcttggttttttttttttgaaatggagttttgctctcgttgcccaggctggagtgcaatggcgcgatcttggctcactgcaacctctgcctcctgggttcaagcatttctgcctcagcctcccaagtagctgggattacaggtgtgggtcaccacacctggctaagtttttatttatttatttatttttattttttatttttagtagagacagagtttcaccatgttggtcaggctggtcttgaactcctgacctcaagtgaacatctgcctcagcctctcaacgtgctgggatttgtgagccaccacgcctggcctaattttctaaaaataaatttattggttattatgtgtctcccccactagaatgtaacctcctccataagcgcagagatctttgcctgtctggttcactgctatatcccaagggcctaggacagtgcctggcacatgatagctgtttattatctatttgctgaataaatggatgaatgatggattttcttttacatagagcaatgatggggtcaaagtaagagaacactaaaggagaaaaaaacagtagggtctgaggactctcttgggccccgtcccttcttgacaggttttaccataataagttattttagagatgatgataataatgatggttaccatttaaagagcataggcattgtactaggtgttttacatacattatctcatttagtcctctcaacagtactatcagacaattacagatgctcctctatttacaatgacgtcccatggatgggtttatgaggttgtaatgccatgcccatagtaagttaaggagtgtactgactgtgtgttgtttttgcaccattgtaaagtcgaaaaatcgtaagtcaaaccatctaaatcaggaaccatctgtactgtctccattctccattttaaatacaaactgcagctctgaaatttggcttttcagaaatggactagtaagtggccaagccatatgcttctattcaactcccgagggaactcctcaaggacagtgtcttcctctatcaaagctgtgctaggttaccttcttcctcacccaaccccaagctaaacctatcaattaccttgtccagctttgcccccaattaaagactgtcctcccaatcaccttgtctttagagacagcagcccaggagttaagagccattcgtagccccgtcaaagtctccatcctttgaccctcatttttctccttcagctgtttgatgagagcccggatcacatgcttattcaggcaacctggacagggaggggcctcaagtcagggcagagcctctggtactgcccctctctgcaaggacccattgaactccactgtgccatcgagacctaagttccaagtcctaggtaccacagtgttgctcatcttcccaggataccagggcagctggctgaatgtgaacactattccaagagccctccctctccctctttctaatctcttttcccttttcaccccaccttcctctcttggttcaacataactgggatagttctcaggccttgccaaatggtaggttggagcaagtgtatgctcctcacccatttgtccttacccaaaggagaaagtggttgcactttctcaactccccaccaagggagaagacatactcacccaggatggccagggttcggtaggcctcgtacttcactttctctggaccagtttgggcctaatttaagaggcgggtggtaggaacatataataaggtgatggaatgtcagagctttagggattgtctcagcttaacttctcattttacaaaagaggaaactgaagcctagaaagtgacctatctattctcaaatacagaatacagccaaaatggttcaatggaaggaacaatacagttgggagttagatgtttgttcaaatctctatctggtatcttgtagccacttggccctgggcaagtcccttggtctctcagagctttcattttctcatttagagaaatacagatactaattcctggtgttgttgtaagagttaaatgagattatggatataaagaatgcatgttcccagtggtaagctgatgtatacatatgcggtgtttccagtaaaggcagagaatgtactctgttctggctttcagactttcctggcttttcagtccaatgtcttttcggttagaccagggagatcttcagattcttccttccctatcttttagatccagctgctcttcgaagaggccaaggacatgggatgggtcatgctgcacagtggtggctgtgtccttactggatctgacccgccatcctagcaccccggggagcctcgtctgtgcccacatgccacacatctcagaccctgtttccttctttcctgaactccagcagttctcagactcaccacctgctgtagtgcctccatgacaaacttgtcactgatgcgtaagcatcccagagcctgcaggaagagggatggaggaaagagaaggaaacttggacatcatccccaggagttaccattctctggatacagctggagtttgtgcttggaataccatccccacaaccaccatcacgtcaagcagctttttactttccagcttggccaactcctggctgtaaccaccctcctctatccttgcctcttctcacctgtgctgcatagaactgctcatcctctctgggagattccaggctttttgtgagttcctgcccatccaaggcagccagtggaaaggaagacagagaaaaataaagaatttcaaactaaagggagctcatccaatccaatcccttttcctaccctacctctgtttttcaggcaaggactgagggctgaaggatggtgtgagcccaagggaagggcacccacagggagggagtcccccacgtcctctcccacatggtcctgacccttaatctttgccacttcagggggtcctgggtaggctctaagggcctggatcgcatctcagattttatagtcagcttgctcattgggagatggaacattttgatgtgggtttgatgtacctctttgatgtacctgtgtgagaaattgcataggcagctttggtccctttgtaccttccctcctcaggttgcaacctcacttctgccacagggctacagcccagctcagatatgggaccagaggaagacagatgaggactcagtgatatccaccagagccgagccgagccgagccggccgagccagatggagctgagccaagccgagccgccctaagctcctctctgggacctgtaggctgacttgccttactccctggcccaccccttccttgcccttcctcactttcctagaagatgtggagggtgagaagaatatggaggccagcaaaacacacctacagtcatctctcattttcctcaacatcttctcagcctccctttcctctcgctgatcatacaggtcgtgccagtgcgtgtagatctcaggtttcttgaagtagcagtacgggactgagtttggcttgctcggatgctgcctccagcactctggacttgggggaaactcttcctttggcatctgggggttgcaagtggcagaacagtcagaggggtcccctaggcccttacttgtgagggtatggggaggagggggtaaagggagggaagggcagggtgaaacagatgccctctagcctctcatctgagctggagtcacagctaccacctaaccccttgcataacttgggcaagttacttcatcctatcaaagtctcagtcttcttatctgtaaaacaaagctaataatccttgttctgtgtccctaccaaggttgttgtaaagatcaaaagagagatccagattgtgaagccactggtgatctgtaaatcgatttgaatacatagtttggttagttgaggatctcaaagcactttgaaaatgacacttgagtagggaaatgaaaaggcaaggtgtggggaggatgtgggataaaggtggggaaaagacagactattgctcattcagatatttatttgagtaccaactatgtgccagatactgtgctgggtgctagggttgcagttatccctgccctcatggaacttaacagtttagcagggaaacagactttcttaaaataatctatcacttaaacaattgtgaaactaccgctgtcactgtaatggaggattttgagtggatcaggggctttctctgaagatttggctaggattcatccctgtctcttcttaagcctttctttcactctttgcaacagatctgggcaacagggaagaggggcttcagctgtggttcccaactttgtactgaagagatcataataagggttctcaagtgattggcataagttcaaaaaatggagcatgactcacagtgagtagggttgcagatttaggaagaaaaaaaaaaaagctccccgctcccaaacaaaaaaatacaaggatgtcaagttaaatttggattttaggtaatgaatgaaatatttgagacacatttgtactaaaacaccatttgttgtttatccaaaattcaaatttaattgggcattctgtatttcatctggcaacccaaactgtgagggttgctaactgtccctgtgttaactaataaaaatgacttccattagtaagcactttctgcatagccaaggcctcatagactttgtttcataacaactctacaaagggaggtggacaggggttagcctgggacacaggaagctcctgaggctctgagggggaaagtgactgttcaagatcacagttaatggcagccccaggggtaaatgtcagggttctgtgagctggctttaatgggaagggatagtttgctgcccctcctaactttgatacagctcccagggtagcaaaagtaaggggtcttacctggtagcaggacaagggcagatgaacaggagccatggcttttctgagttctggcaagagggataagagtatgtgtgtggttcaaatgagatagcagttgcaggccaggcttggtggcttctgcctgtaatcccagcactttgggaagccaaggcaggcagatcacctgaggtcaggagttcgagaccagcctagccaacatggtgaaaccccatctctactaaaaatacaaaaaaaacattagccagccaggcgcagtggctcacgcctgtaatcccagcactttgggaggccgagacgggcggatcacgaggtcaggagattgggaccatactggctaacatggtgaaaccccgtctccactaaaaatacaaaaaaaaaaaaaaattagccatgtgtggtggtgggtgcctgtagtcccagctactcaggaggctgaggcaggagaatggtgtgaacccgggaggcggagcctgctgagatcgcatcactgcactccagcttgggcgacagagcgacagagcgagactccgtctcaaaaaataaataaataaaataaaaatttgccaggggtggtggtgcatgcctatagtcccagctacttgagaggctgaggcaggagagtctcttcaacctgggaggtgaaggttgcagggagccgagatcatgccactgtactccagcctgggtaacagagcaagactcaaaaaaaaaaaaaaaaaaaaaaaaaaaagagatagcagttgcaaaggtaggttaaagaattaatacattcaggcattcatttattcagcatttagtgactactagtaccagatatttcaccaggcactggggagataagtaaggccaaagcgggcagattgcttgagccaaggagttcaagaccaatctgggcaacaaagtgagactgccccctaaccctcaattaggaaaaaaaaaatcacttggagagtttgttaaaacacagatttctgggactcatacccacagtatctgattcactagattaagggtggggtctgagaatttgcatttcctgttttttgttttgttttgttttgtttttattgagacagagtcttgctctcttgcctgggctgctggagtgcagtgtcacaatcttggctcaggtcaacctctacctcctaggttcaagtggttctcgtacctcagcctcccaagtagctgggattataggtgcccgccaccacacccagctaatttttgtatttttagtagagatggggtttcaccatcttggccaggctggtctggaattcctggtctcaagtgatccgcccgctttggcctcccaaagtgctgggattagaggcgtgaaccaccgtgcccagtcgagaatttgcatttctaacaagatgctgatgctgctggtcatgggatcacgctttgaggaccactgttctagctggagagacagaagtgtttcttagtgattaacagagggaaacaaatgtgaagatagatgtagacacaggtggtaaacatgaggggtacctaacctggctgggaggataagggaaggtttcctagagtaaactccacaagctgagtcttcaatacaaacaggaactagccaggtagataagggggaagagcattagacacagggaacaccctatgcaaagatttggaggtgcaagaattgagggtaaagagcagggtacaggtgtgggagcagaagctggggagacacacaggtgtcccatcttagagatccctgtaggccctgctgaggagcctgagaccttgaggactgtgcagagccatcaaagtgtccaagggcctgccctgatgtttcccaagggtttgctgaactcacctagacccttgcctgggagtgagagccaggtagcatttctttttcagtcccctgctcttggctccatttctgtccatcccagcctcacctttggtcttgtctggatattccagccatgggtacaggaacattgacctggagacatcagagatatcagttgatttttcataggccatcttcttctcctggtggggccagagggaacctgcaggggggaatacaaggcttttaggggagtgggggcacagctggaggagacctgtcctctgtggtacgagaggtacaggggaggtgtctggacttctggaggtagaagcttccaagtgctaagcgaccaggttactttggtaaatagaacactcaggtttcacttctgagccccagctgtggtatctactggcctggacttgagctagtcactttattttctgagcttcagtttgctcactggacgagtaggaaagtcattcctgtctggcttaactagagggcctgtggtgaggcataaactggagaagaaaatcaaaccatctggtgaactgtcaagctcaagtaagcccatgttaggatcaagacctgttcttaggattattcactgggaaaatggcagggatgggaaagtccctttatttatttatttgtttgtttgtttgtttgggagggagtctcattctgtcgcccaggctggagtgcagtggcatgatcttggctcactgcagtctccgcctcccaggttcaagcgattctcctgcgtcagcctcccaagtagctgggacaacaggtgcatgccaccatgccaggctaatttttgtatttttagaagagacggggtttcaccatgttggccaggctgttctcaaacttctgacctcaggtaatctgcccaccttggcctcccaaaatgctgggattacagatgtgagccactgcgcctggccccagaaagtcccttttatacataccctctccccgtctttggcagcaaaagactgaactcttatctgtgtggtaaggagctgcctttttcttttattttctttcaactttttattttattttactttatgttccaggatacatgtgcagaacgtgcaggtttgttacatagataaatggtaaatgtgtgtcatggtggtttgctgtacctctcaacccttcacctaggtattaagcccagcatgcattcgctatttgacctgatgaaggagctgccttttatacctcttgcttttgcatatgctgttccctctacctgtcagtcttttacttgtaaacctgttaaactggcactcagatctttcaaaaagtccactcaaatgttttctcatctctgaagtctttattctccctcagggttcctaccccctgcccatccacccactcagtgatagaattccctctctccacagtgtgaccacagttttttgtacactttgctttactttaagtctttttcatatgtataatctgctcacaggtctgtcttccttactggactatgaggaatttgattatggactgtatattgtgtcattgttaagtttcctgagtatggtatgcatgttgtggttatttataatgtccttgttattagtagatacatgctgacacttttaaggatgacatgatatcacatttgcaacttactctcaagtggttcagaaacaaaatgtgtatactgaccacacactgcccccacacacagataaagcaaattggtaaaatgtcaatatttgactctagatgaagggtatgtggtgtattcttgcaaatttccataagtttggaattttgcaaattaagggtggaaaaaaaaaagcatggattttggcattagacctgatgggtttaaacttaattgtaaagctttatcacctgctttatttttctttctttcttttttctttttttttttttttttgagactgagtctcactctgtcgcccaggctggagtgcagtggcgtgatctcggctcactgcaagctctgcctcccaggttcacgccattctcctgcctcagcctccagaatagctgggactacaggcacccgccaccacgcctggcaaatttttttttttttttcatagagacggggtttcaccgtgttagccaggatggtctcgatctcctgacctcgtgatctgcctgcctcagcctcccaaagtgctgggattacaggtgtgagccaccgcgcccggcccacctgctttatttttctttgagctgtggggcttttggcaaatcatttccctctcttgctaagggttttcctgactataaacagggctaataactgtacctaaccctatagggttataaggatgaaaaagaatgatgaatgtaaggggctaagccaatgcctggcacatagtgagtgctcaattaatgttaactattgttatggccatacatattgtcaatatatgtttacataaagggacaagcttgggaaagttgaaataccccaccttaaaggagctggtgtactagtggaaaaacacaaaatacctcattgtccttatttgaaagacctgaggcatttggaattgccattgaatctcattccaggggcaagagtggtgttaaagaaatccactggggataaggtagagggtaggccagggaggaagggccaaccaaggtctgaggaaacagagagatgctgtggcaggcagtaagataaacttggggactcaagggtggggacgtagtgactattgtctcccctccccctccagagtgggtaagtcactgattagtttaattgctgtgcctacccatgcccccttctcggagagcttttgttttcagccctgtcatcccaatctaggatggacatcaggtgtttgcaagccctggacccctgtgtgcctaatgctcatggggaaggacagttccccgggaggaaatcaagagtcagctttatggttgcattgagaactttaatggtaagccgatttttcatgtttgccagtaagctcctgtgaggggttgagacggcggaagcttaagagtgcagtgttcctcccctccttgcctctagaggcatgctgacttccttcctggtcacagagccctggcaaagccaaggcaaagccagagctcagaacctagagacttccttttgacaaagcagcgcctcagaagctcttctaggctttagttggggaagctttttgttgttgttgttgtgacggagtctcactttgtcacccaggctggagtgaagtggcacaatctcagctcactgcagcctccacctcctgggttcaaacaattttcctgccttagcctcccgagtagctgggattacaggcgtgggccaccacgcccggctaatttttgtatttttttttttttttttttttttgagacggagtctcgctctgtcgcccaggctggagtgcagtggcgcgatctcggctcactgcaagctccgcctcccgggttcacgccattctcctgcctcagcctcccgagtagctgggactacaggcgcccgctaccacgcccggctaattttttgtatttttagtagagatggggtttcatcatgttggccaggctggtctcgaactcctgacctcaagtgatccacccaccttggcctcccaaagtgctgggattacaggcgtgagccaccacgtccagcctggggaaggtttttgtaactgctgctgtgtggtagaatctgggcccttcaaggagcgggtggggtaggatagtgaggggaagcctcccaagctaggacaagagcaagcagaaacaggcaaatttgtgtaagttcaggttcaaggactctccatcctagctcatctccaaagagttgatgtactcccgaacccatttcttctctgggttggcacacacttggcggttctttcgggtgacaaagctgtgggagaggagaagaagagggaggatgagaccttgtcagtaccgggacagccagtttgggggatgaagtggattaaggtataaagggaaattatgatgatatcggggtagggcatatttggagctccataagattttatttgtggcttttaaggagagaacatttcctcatctgttggatcaaagggctccaagccagaaacaaatttgtgtgcattttaatcgccttcacacaaatgcatgtagcctgaaaagctaagaggatacggagccttgaagcccagggctgagcctgccaatcactagacttttctcagcacttcctctgctccaggccttgtgctgggtgcttaagatgcagagagaataaggtgtccctcaagaactgagtcatgattgaataagtgggagacaagaagttctttttttttttattttttgagatggagtcttgctctgtcacccaggctggagtgcaagtggcacgatctcagctcactgcaactttcgcctcccgggttcaagcggttctcctgccttagtctcccaagtagttgagactactggcgcccgccaccatgcccagctaatttttgtatttttagtaaagatggggttttaccatgttggccaggatggtctcaaactcctaacctcaggtgatccacccaccttggcctcccaaagtgttgggattacaggcgtgagccacggcgcctggcctctttttttttttcctttgagacggagtctcactgtcacccaggctggagtgcagtggcacgatctcagctcactgcaagttccacctcccgggttcacgccattctcctgcttcagcctcctgagtagttgggactataggcgccccccaccacgcctggctaattttttgtatttttagtagagacagagtttcactgtgttagccaggatggtctcgatctcctgacctcgtgattcacccaccttggcctcccaaagtgctgggattacaggcatgagccaccgcgcctggccgagaagttcttaaaagaacatctgatttggctttagacaacgcagtgcctggcacactcaacaagtgaatacatctgtgcatgggtgggtgaacgaaagatgggcatgaccttgagtcttcatttcaccatttattagtttgatcattttgtgcaaatcacttaaagcctctgcttctatttgctaagctctgaaatgtagatagaaataattctttgcacaattactgtgaagctcaaaggataatatgtatgaataagtttggaaaaataccattcatgtgttgttactagaatgctctgaaacttctcctttagggtggatgagagcaacatgagactaaaagtcctggtactagacactgtggctcaggggagttgagggccatgagataatggcaatgtcaaagcacttgcaccaagtaaccagccagaatgtggaggcctatgagaatcagaggccttatctctatagtcattgatgataaagctggaaatgtaaaagttgggggtcatgagggtcagtccagctgcctgcctcacctgtctgctgggaaactgattctacctgtgcgagaccttgggccttgctagcagcgctgccaattaacacattacttcagggtcagtcctgcctacttaccctttcccattttggcttttcctttaggattttttcctgcacattattcttattattatttgaaatttgaacactgattttacttaagttcaaatactggatatgttattttagagattctcataggaagaaaatcaactatttattgtgcagccatccagaagtttatttatttatttttatttttgagacagggtctcactgtcacccaggctgaagtgtagtgacatgaacacaactcactgcagcctcaacctcctgggctcaagtgatcctcccaccttagcctcctgagtagctgggaccacaggtgtataccaccacacttggctaatttttaaaaatttatttttgtagagacaagctcttaccacgttgcccaggttggtctcaaattcctgggctcaagccatcctcctgcctcaatctccctaaaatgctggtattacaggggtaagccaccatgcctggccagaagtttattttattttttatttttgagatggtgttttgctcttattgcccaggctggagtgcagtggcacaatcttggctcactgcaaccttcgcctcccgggttcaagcgattctcctgcctcagcctcctgagtagctgggattacaggtgtgcgccaccacgcccagctaatgtttttgtatttttagtagatacagggtttcatcatgttggccaggctgttcttgaactcctgacctcagatgaccacccgcctcagcctcccaaagtacagggatcacagacgtgagccaccgcacccagatagaagtttattttttaaatcttattgacccatgcagtatgccacatgattacatagcataacaaaggaattatatgtctcaaacaacacagaaattccgcctttgcttttgtgattactatcacattaaaaaaaaaaagaaatgtattccctagatggaagtattattcccaaatatgttctgatgtgctatgtacccaccttatttaaatatttcatcactcattcattctttggtttaatattttcattctttctctatgcatgtattggtgtgtctgtcaaagtcattaagctcttgtggttctcctgattctgtgcctaacagcattaaatttttttttaattgtggtaaaatattcataacataaaatttaccatcgtaaccatttttggatgtatcctgcacattcttgagcctaaatattttcagacaaagtgaagccttagattgtctggtgagaatgaggatttcttggtttctctttgtgtttccctttcccagcctcactcagagccacttgaccatctctttttctcccaccccggtgtgcagagatgaaaagggaacggaagcaatattctggcctctcatactttctagagtttgtgttcttatttagggtggtgtgagagtttcagacacagaccttgcccttgttcagccgggagtcatacaggaaatcctgccagacttgctgtccctctctctttggcatccttgacctgtggctaggaagtcaaaaggccaggaaaacaatacctgagatgagggtagctcaggcctccatttcctgcccccaacctccccgcagactgtgataccaaagaacagcccctccttgccaagtcttccctccttacctccatttttggcaccctctgcttgcctgacttcctccttctgcctaccccttaagagcggatgttctcaaagctgctgcccttttctcttctttgcgttttttcctaagtctctggccctgggcctggcacatagttgatgcttaatggatgtttattgaatgattaagtgaatgaatgcaattcactcattcattccttaagtttcacctgttatttttgtgtacgcaataatgcatttagatgataatgataataataagctaacatttatgcacctactgtgtaccagagcatattctaagtattttcatcttactgtgacccagtgggggaagtacttctattaccctattttgtagaggaggtaattggggttacgagaggttaattgaagggcctacactcaccaagtgtcatagctggagtcctaacaaagcaaactagctctagagccagtactcaccaaggcaggctgcattgcctttttaaaattgggatacccctttttcccacaaaagaatgtcatattttcagccctaacaccctttcctcagctaccaacccttcatttcaccatcaccactggacatatccacagggttatcttgctggcaccttagctctttcctctttaaacagctctttcacaaggcttaagatggttctacacttctccagccagaggtggaaacctcagtgtcatccttaacccccatttttctcccttgctcttgagctcaaatcacctgctagggcttgcaaattccacctttgaaggtttcaaaagtgtctgtctttgaaacctcctgtctctcctttccttcaggcactgttcagcctccaatactactcacgtggataacaacagtagccgctaaactggactcctgttttctcagctttccctgttctagctcattttacacttgacagctgcatttagcacttttgctgcattttcctgacactccgtgctttcctacatggagactgtacataaaccaaagtagaatcctgggggacagtcccttttcctgatatatcccattccctaggcttttctctgccaggccaaatctctcctcagacagcaccatttgcagcaaacctgtaaatccctgaagctgaatgtgtttcctctctctttcccttgtcatgtttttttttgctgtgtactctagtcattgctgtgtctgtcttgcccctcttattagactatgagtcccataaggttgggctgggacagtggctttagtaatctgtgtctgccaatagtatgtgctcagggaaggattttcttcttttgaaaaatatttgttttcagaaataaaattagtaattgttaaatattaccattatacttaaaaggattcatcagatccaaagtctgtctttgagtacctctaactttgccagtgtcataaatttttggattaaaaaacttcaccctggctgggtacagtagctcacacctgtaatcccagcactttaggaggctgaggcaagagaattgcttgaacccgggaggcaaaggatgcagtgagctgagattgcaccattgtactccagcctgggcaacagagtgagtgagactctgtctcaaaacaaaaacaaaaacaaaaacttcactcttatataagaaacttcagaattgcaccattttcattttttaagtctctaccataaatttcttaagcaattgtcactaatgactttgctatagtagaaagaggaggctctagagatggacttcatccctcatttactgtgcagccttggctaaatcaataaacctctctgaatcttagtttcaatacctgaaacatggagagaattatgcatacttgtcagagctaagtgtaatttaaagatcaggcacataagacatttgacacatagtaggcatttcctatatagtagggtttattatatttttccaaatatactagcttgcatatttaaaggtgaatctcatttccttatttcttctctgatggatggctttttgtttttttatttgactacagttatagatccctgacctctgacctcttctccctagttcctctgaggtttaggtggatttgattgggtgtgaaatatgggggactgtgtgaaatatggggttcttcactgaaggggatgactgacttgatcttccccacataggagcattccagaccatgtttcaagtaaaggccacactagtaaagattggagtcctaggccaggcacagtggctcatgcctataatcccagcactttgggaggctgaggcgggtagatcacgagggcaggagatcgagaccatcctggctaacacggtgaaaccccgtctctactaaaaatacaaaaaattagccaggcatggtgtgggcacctgtagtcccagctactcgggaggctgaggcaggagaatggcatgaacccaggaggtggagcttgcagtgagccgagatcgtgccggtgcactccagcctgggcgacagagtgagactctgtctcaaaaaaaaaaaaaaaaaaaaaaaaaaaaagattggagtcctgggaacatagtccattggagtgggcacgattctctaaggacagcttgtctagtctttttacatgatagcaggggactctgaggctagagatggaggagctgtggctgcttgcagctggaggataggtggaagtgggtagggcatcctctcagaggactcctcagggaacaggctctgggagggctccatggggctgagactcacacgactgctgggttggagcacttgccactggtgtagaaatactccttgatgtgggcacggggcagtgggcgggcaatgtaggcaaagcagcagggtgtggtgtccgaggaatctggaagaggaaaggaaggagggagacccttttattcattgctactgcacacttgacattgtgctggacactttatatgatttatttagaaagaactgttatcttccttgacagaaactgaggctcagagaggtaaagtcacttggccatggataaacagtggcagagtggggattccaatgcctcatctaatccttgagccaagcttgtatccatccctctacaccataaccttctgccctgggctttcagggcctcctcctggcttgtcctgggtcctctggcttcattcttgcccttccagcatcctcaatggatttggaacttggtttctttgagacctagggcaggttgtggggaggcttccaaagctcaggctccatgactcagccaggatcctaagaagggcctggagatgcatattgtatcttgggagctctggttgagcttcagtgagaagggctctcaacagagaacttcttgttggtcagttaattcaagatgacgttgggaagcatcagttgccacttcccagcagaggagtagtttttattttcccagcaagatggaaccaggtttgaataccagtctccccatttcctagctgtgtgcctccatggacaagttacttaacctctctgttttcccatctgtacatcaaggacagctactcaaagaagggttgtgggtattaaataagatgtacaaaaatcggctgggcacggtggctcacgcctgtaatcccagcactttgggaggccgaggcgggcggatcacgaggtcaagagatcgagaccatcctggctaacatggtgaaaccccgtctctactaaaaaatacaaaacattagcagggtgtggtggcgggtgcctgtagtccccgctactccggaggctgaggcaggagaatggcatgaacccgggagacggagcttgcagtaagccgagatcgtgccgctgcactccagcctgggcgacagagcgaagactccatctcaaaaaaaaaaaaaaaaaaaaaaaagatgtgccaaaatcagcacaatgcctgatccatagtaaccatttaattagcttttattatcctctccttgtttttatttgttttttaaatgtattcactctaataaagccacataccctctcataagccaattttttttacatttatgaaatgagagagaatatggctgtctcagggtctcaggaagttttagtttagttaaatttcttagaaaccctgctgctgacaggcatgagtcagacgtgtttcaaagtcagtgtgagctactcatgactactaatctccccaacatgagtccacactcagtgaacacctgtaggccttgagggtgtagaccttaaagacagaaaaactgatcaggagatccctgccatgaagcagcatagagatctctcaaggacaacaggacatatgggtaagacaattcataagaatgtaaataatggggttcagacagtattcatgctacagttgaaaagagggcaaggtgtgggacagtcattgggatggggtaggcattctaggcagagtctgactccaggggctgtggtggtcaagaccaggacttacatggggaggcagatgcaggagcgcagagggcagtagcaatgaggatgacagcgagggctgccgcggagaccttcatggtacctgtgggagaggctgtgcgaggtccacgtgctgtcttgatcctctgcaggaatcctctgcagctcaggctggccctttatagggccagttgaggggcatcccctaaggggagtttccaaaatagcaaccaagcattggccggtatcataagtgaaattgcacaaaacggaaaagaaaactgaaatagcctccggaaattcgagtctctgtctctccctcactgctctctcatctagagtgagctcatcagtttcctctttgaccaagcaccaatggtggaaaaatttctctgctgacatccttagttttaccttccagggaaggggtcctcctcagagagcaggaagccgctttcttggggacaacaaggagtggcagttaggacaggatcagaagtcactgagtctttattactcactgagtcactgagtcttcaaagttcctgcttattcattacagatcttacctcctttccctcatccatggaaggatgttatttataaagtgttttattgaggagggtcctctggatatacagtccccaaaggaggtgagcacactcacactgtaaattgaggcagttgatctgagctgggcattgggaaccttttcacaagatatgagttggaatgagtcctcttgtgggaatttcttgctttcatcctggtcatagggtctctcccatttacttgctaagcgacctttgggaaaagtgcttaatgtctttgagttctatttccttgtttataaagtggaataattgattagagacttgttgagaagcagagggagagaaagatatcttacagcatactctatcattattggctaccatttaccgagggcttatctgtgccagccactattccactgtcctagcgcgtgtcaactcatttactattattatccccattttatgaatgaggaaactcaataaatactgggatcccatctcactgtaaggccttcttgggcacaaaagttacagaatatgaaagcttcaaaggactttagggatcattttttccatgttcttcagttgcacaagaggaaaccaaggcccagtgagcaggagtgacttgctaagaacacacagcaaatgaatgacagagttgggatcagaacccagttgccctcactcccacttcagtgctctgtccattaagtactgcccaacattaaagggttcgtggttaggagtatcctcaaaactgaacccatgtggaacttctggattagagctagggtccttactgcattccaaagaactggatacagtaagtcttcatcaattcctattttagtagttcagaattagcaacaatttggtccgggctaggctgaaattggcatctgaataataataataatattattattattattattattattgagacagtcttgctgtgtcgcccaggttggactgcagtggcacaatctcggctcattgcaagctgtgcctcccaggttcacgccattctcctgcctcagcctcccaagtagctgggactacaggagctggccagaatgcctggctaatttttttgtatttttagtagaaatggagtttcaccatgttagccaggatggtctctatctcctgccctcgtgatccgcccgccttggcttcccaaaatgctgggattacaggccgtacccggccggcatctgaattatttaagagaaaagtgtttattgagagtgacaaaagcggccgggcgcggtggttcacgcctgtaatcccagcactttgggaggccgaggcgggcggatcatgaggtcaggagatcgaggccatcctggctaacacagtgaaaccccgcctctactaaaaatacaaaaaattagccgggcgtggtggcgggcgcctgtagtcccagctactcaggaggctgaggcaggagaatggcgtgaacccgggaggtggagcttgcagtgagccgagatcgcgccactgcactccagcctgggcgacagagcgaaactccgtctcaaaaaaaaaaaaaaaaaaaaagagagtgacaaaagcaaaataaacaaaatgtaaccccctactgagatcattttctgttagctactctcacacttgtaacatggtggttgacggtgactaaatcacccagaatgggaagactttgccacatttcttcctcacgatgactttgaggcagagtggttgttcttctcatttgaccaaagaggaaagtaagcctcagaacagataattaacatcttcaagatcacgcagctgataagtgggatttgaaggcaggtgtttctgatgaccatgctcaagctctgtccagtgaatcacatcagtaagtcagttaacagttatcaagacctttcggccaggcgcggtggctcacacctgtaatcccaggactttgagaggccgaggcgggcggatcacgaggtcaggagatcgagaccatcctagctaacacggtgaaaccccgtctctactaaaaatagaaaaaattagccgggcgtggtggcgggcgcctgtagtcccagctactcgagaggttgaggcaggagaatggcgtgaacccaggaggcggagcttgcagtgagctgagatcgcgccactgcactccagcctgggcgaaagagcaagactccgtctcaaaaaaaaaaaaaaaaaaaaaaaagacctttctaggttacaggtgccattccaagctttttttttttttttttttttgagacagagtgtcacttttttgatcaggctgaagtgcagtggcacgatctcggctcactgtaccctccacctcccaggttcaagcaattcttctgcctcctgagtagctgggattacaagcgtccgccaccatgcctggctaatttttgtatttttagtagagacaggatttcgccatgttggccaggctggtctcgaactcctgacctcaggcgatccgcccacctcggcctcccaaagtgctgggattacagatgcgagccactgcgcctggccttgttccaagctctttacaacaatcctctcataccctccttacagctcaatcaattaacaatggaaacgtaattttggaaagtatggccatctcatttaaagaaacaaattgcaagcactttagaaacattcatccaaccacacaaaaatgttctaccaattgtttccttcacaaagccccgttaggtctaaggtaagttaccaaacatgtgagaggttctggaaaaggcggtgggttaagagcagggactcggcagtttctcctgtttattgtccaggtggcctcaggtaaattattaataatctctctggtctcagtttccttacctataaatcagtgataataataataatagttcctcacacaactatcgagacaattaagtccctataaatgttctcatgcttgcaaagctcttagtgcaacgtctgacgcatgttaagtacttaataacattgcctattattatcatgttatcattaagagtaagatgtcagtgcctttaaggatattctgtaatttatgcttttcaacagtctaaactaaacccccagtcaatatgtattcgtatttgttacaaaaaaatatttatttattacaaaaagcctttttttttttttttttaagacggagtctctcactttcgcccaggctggagtgcagtggcacaatctcggctcactgcaagctctgcctcccgggttcacgccattctcctgcctcagccgcccgcgtagctggaactacaggcgcccaccacctcgcccagctagatttttctgtttttagtagagacagggtttcaccatgttagccaggatgttctcaatctcctgacctcgtaatctgcccgccttggcctcccaaagtgctgggattacaggcgtgagccaccgcgcccggccacaaaaagtcttttttaaaacagatgggtagttgaggcttagagtggttaagtgacttatagtctgggttcatgggctttctaccacacttcattgtttctagagaaaatcataaaactattaccaaggctcagttttcttctgtgagctcaatttctgttttctttccttgatttcagtttccctctttaaggaagaaaggaaagtgttttcctggatactagatatgctgagttgggacaggagctaaggatagaggtgaggaaacccgcagacaacagcgacatgctcctcatctttgagtcccagcgaacctttccactgtgtgtgtgtgtacgtatatctgtgtataagtggtggtgggacagaggttgggtgggtaggatggtgggatgttgggattgctgagtgggaataggcagtgggaatgtcaaaagtatttttgttgttgttgtttgaaacaggatctcactctgttccccaggctggaatgcagttaactgatcacctgcaggcttgaactccagggttcaagcgatcctcctacttcagcctcctgagcagctaaggactacaggtgtgcaccaccatgctgggctaatttttttttttttttttttgagatggagtctggctctgtcacccaggctggagtgcagtggcgcgatctcggctcactgcaagcttcgcctcccgggttcacgccattctcctgtctcagcttcccaaatagctgggactacagtctcccaccaccatgcccggctaattttttgtatttgtagtagagatggggtttcactgtgttagccaggatggtctcgatctcctgacctcatgatctgcccacctcggcctcccaaagtgctgggattacaggcgtgagccactgcaccatgctgggctaatttttaaatttgtcgtatagatgggatcttgctatgttgcccaggctggtctcgaactcctggcttcaagcaatcctcccaccttggcctcccaaagtgctggggttgtaggcatgaaccgccacacccagccatgggagtatttttcttccctttcagtgattctaatggattgtgaggagcacaggagggaggagaatctaatttttatttcatgtctaccattcattttctcctgtgcaaaatcaaggtttgggcttgatgggctatcttcaattttttctctggtgctaatgaactgattccataagcaaattagagagcccatgtaaacagtatggtgcctggtacagggtgggtgttcaatgaatggcaactatcattattattcacccagcacattatgttcctgaaaaccaggaactgcttcctgtctgacccactgcagtggtggagaggatcaagggaaataatgatcatggatgtgcttaggagacgtaaggtgagatacaccatcatggagctgtctctgctctccctgtcccttcagtgtgcatggtccataccactcagtcattccttacccactctacagattttactaagaattgctgtgagctgggcacccttctacgctctgcagacaccatggctagtaagacaggcaaagacctgccatctggagcttgtttggatatagggtagggggacggggagaagggagataaacaataaacaagtaaatttacactcttttattgtgaatcatcctttcactggtcttgtcttaactccatgaacacagcgacagtgtcctatgtgttttctatttatttgtattctctgcctactttccaataaatgtcttagataagctgctatatcaatgcagattaagtcatactaacttcttgtagcatcttaattaaatgggctctctggagtcagacttctaggttcaaaatccagcttcatgacttattatttatttatttttaataaaaactatttttaataaacatcatatttacaacatgacgttttgatatacatatacatagtgaaatgattattccagttaaacaaattaatatatccatctcctcatacagttaccgctatttttgtgtatgtggtgagagcacttgaaatctcttctcttagaaaatttccagtattcggctgggcgcggtggctcacgcctgtaatcccagcactttgggaggctgaggcgggtggatcacctgaggtcaggagttcgagaccagcctggccaacgtggtgaaacccggtctctacaaaaaatacaaaaattgtccgggcatggttagtggcacacgcctgtaatcccagctactcgggaggctgaggcagaattgcttgagccagggagacggaggttgcagtgagccgagactgtgccactgtactccagcctggccaacagagaaagactcagtctccaaaaaaaaaaaaaaaagaaaatttccggtatccaatacaatattattaactctacagtagccctcccttatctgtattttggttattctggttttgcttactgaggtttcagttactcttggtcaaccatggtcagaaaatattaaatggaaaattccagacataaacatttacataacttttattacagtatattgttataattgttctattttgttattattgttgttaatctcttactgagcctaatttataaactaaagtttatcataggtagtataggaaaaaacacataataaaatagtatataacaggtactatccatggtttcaggcatccactgggggtcttgggacatccaccacagataaatgggaactgctgtagtcctcatgctacacattcgattctacataactgcaactttttgccctttgaccagaatctcccaatttctcttacagccctgccactggtagccaaagttctattctttgcctccatgtatttgacttttttagattccacatgtaagatcatgtagtattttcctttctatgtctgccttgctgtgattaatgatgactttcaacaagttgcttactttctctgggcctaaatttctttgtctgtaaagtaagatattggacctaacctgtctggggcaattgagccattaaagaatctgatgagggctgggcactgtggcttacgcctgtaatcccagcactttgggagttggaggtgggtggattgcttgagctcaggagttgaagagcagcctggacaacatggcgaaccccatctctactaaaaatacaaaaattagctgggcatggtggcatgcctgtagtcccagctactcagtggggaggcaggaggatcgcttgagcccaggaggcaaaggttgcagtgagccaagattgagccactgcactctagcctgggtgacagagtgagaccctgtctcaaaaaaaaaaaaaagaaaagaaaagaaaaaagggccgggcgcggtggctcatgcctgtaatcccagcactttgggaagccaaagcgggcggatcacccgaggtcaggagttcgataccagtctggccaatgtggtgaaaccctgtctctactaaaaatgcaaaaattagctgggcgtggtggcgggtggctgtaatcccagctactcgggaggctgaggtaggataatttctggaacccaggagacggaggttgcagtgagccgagatcatgccactgcactccagcctgggcgacagagcaagactctgtctcaaaaaaaaaaaaaaaaaaaaaaagccagtgctgtggctcacacctgtaatcccagcactttggaaagccgaggcaggaggatcacttgaggtcacgagtttgagaccagcctggccaacatggtgaaaccccgtctctactcaaagtacaaaaatttagccaggcgtggtggcacatgcctgtagtcccagctacttgggaggccgaggcaggcgaatggcttgatcctgggaggtggaggttgcggtgagcagaggtcacgccattgcactccagcctgggccacagagcgacactctgtctcaagaaaaaaaaaaaaaaagcctgatgaggatgtgagggtgatctggctgcaacatctgtcaccctattgatcaccagggttggttctgttaccgaccatagtttcttgcgttctccatgcaatagaaattgacatgaggccgaaagacttttcccagacaagacttcattggagcttttgcctggacataagggaggcagcacaagagagaattccctgactgactctgtgcaaagagccggtagggctttttaattaggcaaagcatgagaattgacatcaggggtggggtatgcaggctgggctgggcaaagcatgtgaggggtagggtatgcaggttagcactatttggttgtaatggttaccttgagtaatgggctacctggtggtctagctggggcaacaagtctgtaaatcagttgttcagcattccttcctgaggtggaatactccacaaccttggtttgatacttggatttcctaaggccagttcctggaatttgttaagtaaaagacatggttgaacatggtgtcagtgagatggtggtgtggggtttgtgatcagtgggaattcatgaaagaaagttcagtgctggtgagctgcagccaagccccactcccagtctgtctcaatttggctgatctagctggctaggcctgtgtccccttctctctttaccgttccatgtgcgtccctcctaaagctgcgcacttggtttaaccacccaacgggttcttcttgcccgctgcccagatacagcaagtttatcaagacacaggaattgcaatagacaaagagtttgatacaagtagagccagctaaacaggagacaggggttttattattactcaaatcagcctccctgaaaatttggaggctagggttttttaaaggtagtttggcgggcagggggctcgggaagcgggaatgctgattggttgggtcggggatgaaatcataaggagttgaagctatcctcttgcactgagttggttcctgggtgggggccagaagaccagatgagccagtttactggtctgggtggtgccagctgatccatcagaaggcagggtctgaaaaatacctcaaacacccatgttaggttttacaataataatattatctacaggagcaattggggaggttcatgatctcgaggcctttggctgcatgactcctgagccgtcatttctaatcttgtggccaatgtgttagttttacaaaggctttctggtccccaggcaaggagtgggttggtctcagggaggggctgttatcatctttgtttcaaagttaaactataaactaaatcctcccaaagttagtgctccctatgcccaggaatgaacaagggcagctgggaggttagaagcaagatggagtcaattaggtcagatttctttcactgtcataattttctcactgctataatttttgcaaaggtagtttcagaagaggacaaccttccccaatagaggaggactgttctttggtcaagggtatacgagtagctgcgctcccctgctagaacctccaaacaagctctcaaggtccatttgtaggagaatgtagggtagtcaaacttccaagactccagacacatccaaatgaggtgttgcatgcggcagtgtgcctttcttaaaaaaaaaaaaataataatctcatgaaagctgtgaacacttccaccaatctgtagagacctacacagacagacacatgtaattttgcatgtaaggagttcatagaccctgcaggctcactgatgggcctcttgatccacagggcttgttcctatcagctttcacgcctctggcaccccttttcctagcataatcctctaaagccaggcccatatcccctccagcctagtgtagcccctctcctcccctcccttcctggcacagtctttttttttttttttccccatcattcactcttttccaaagctaagctggctgctagccaaggctcacattgtgatgttaggaaaccaaatgcaggcagagaaaatgaaaccttactccatctggattccaaagcttttatctgacatggagttcccctcctgacttcagactgtgggcagcagctctggctgttccagtgctcttaaaaacatgcccaaagcagggacattccccccatcctctagaaatctgggatcccaagagaagcctgaggcaaagtcatttcctcctgatgaaacttaattttccccatctgcaaattggaggttacttcctggttgtttctctccttctttgcccctgttcacaagtctaaatattccccacctgagactggaagctatctcactctttgtttctgaaggaccctgcatggggtaggtgcttcattggtgctggttggaggatctgccagaggcaatagggtgcaagccaagaccttgtagcaggctcaggggacttcccaggaggaggcagaatttgaacccaagactctacaacatcctggcctcgatttttggtccagctctggttggttctttctgtgttattctgttctgctcctcaattcctctcccctcccctccccctcctctccccaccccttcccccaccccctccccctcccctcttctgtcaccttgcactgtgcactttaatgcacattgcactatgtcaaggtactaactttgacaactgctctcataattccaaccacattcaggctgagggttgcagcttggctccccctcactcttctcaccttcaccacacaggacattggctgtgcacagccacttgtttattgcagctggagaccacatgcggtgtgtttgttgatcagagcagcgctcacctgcctctggttactggaggagcctgtcacaagatatcttgggggtggggtgaccacgggaacaaggcccgtggagaagcatcagttcttccaaaatggctgggtgccagatgacttcagactgtccttctcctgataccttggggtctgtttttgttgttgttgttgttttcctctgcatgttggtggctggtggcttcccctctattggtgtataccccctcatgaagtactcttcaagaactcttattgctggagcactgctgtcccctgcacaccccacccctgcccttggccccactgcctccaggccccaggagaaagcctggtaaagcaggacaaacttggggttgaaatcagatagcgcatactttctgtatgtcgttttttgtttgatttttctttagagatgttgcccaggtgggaatgcagtagctgatcattgcttactgtaacctcaaactcttgtgctcaagcaatcctcccgccttggcctgctgtgtagctgggactacaggtgcatgccaccatgcctagctatttttttaaaaaaatgttttctattgaatgtggcttttgtggcagaattttttttttttccctaaagaggggatctcactatgttgcctaggctggtctcaaactcctagcttcacgtgatcctctcactttggcctcccaaagtgctgggattacaggtgtgagccaccacatccaaccctttctgtatgactttttttttttttttttagatggagtctcactctgttgcccaggctggagtgcagtggcacgatcttggcttactgcaacttccgcctcccagattcaagtgatttctggctaatttttgtatttttagtcgagacagcatttcgccttgttggccaggctggtcttgaactcctgacctcaagtgatctgcccgccttggcctcccaaagtgctaggattacaggcgtgagccaccatgcctggcacttttccatatgtctttgaacaaattattaactctttttcaccttggtttgctttctggaaatggggctgagaatacctaactcctaggatacgtcaaaggattaaatgaggcaatcagtaaattgcccaacaccatttctggcacaaagtagatacttggaaaacaattccttccctttctttccccaaatgtcaaggtgccagcatttcttccctcaatggcttcccctcccagtagagatgttcatctcaccgagagttagaaggcatggcggtgggggaggggaagttggggattttctgtgagctgtcaggcaccgtgctagacactacacattatttcacttattaggaagaaacacacagaaaatggtgatgactcagacctgccctgagctctcctgccctcaatgcagtgggctacagacactcagccccatgctctgtccttcactggatttctgtctctcagagcctggccacggagggggatgtgatccttctcccttctggctgtccttgcaggctagcccacataccccttttcaaagagtttcacagagaggcttaggaaggaagccttagaaaggaagtgacaaagtttcagaatcttacaggattctgtagttgtagtctggatctgctcttttttagcttgtcctgggaagccccttggcttcttgcctattacttccattctcagggacgggggtcccagtcccctgcttccccactatgctgcttgccctgctttctagtgttcaggttagaatattagggcccttagaaccttcctaggcattcattgcatttttgaggctctccagcttgcatgaaaaagtccccttggggaatttcctcaaattagggtttggaaattctgcaccgtagtcattccttctagtgtcagctttgggtggtgaaaagagcaaggaatgggaattaagagacctaagctctagtcccattgtagctccaaacccacttgttacattttggcaaaccacttgccctttgtaggcctaagtttcctcatctgtgaaatgagggtctgacaatgttatttatttccctcttagttaaaagatacaaaagtaaaggatttctagtatactagagtgagatttgggggtaagtttcctgtttgctcctaaaatcagttcacattacttctcctatgggtaaggctgagggagtaacataccttctttccctcgtatccatcaaaggcctaggactcactttaccatttagctcatgaacttctgtgagcagcactgtcctcctccgcttacccactcattcctaccttttcacacatcccttcactccatcctgtccagcacgcgtctattcattcatctattccttcatatctgcatcttgtgtctgttaaaattctttgtattcatggccaggcacagtggctcatgcctgttatcccaggacttttggaggctgaggtgagaggatcgcttcagaagttcaaaaccagcctgggcaacatagggagaccctgtctctacaaaaaatttaaaaattaactgggtatggtggcacacacctgtggtcccagctacttgggaggctgaggtagaaggatcacttggacctgggagattgaagctgcagtgagccatgatcacaccactgcaccccagcctggatgacagagtgagaccctgtctcaggaaaaacaaaaaaacaaaaaaacaaaaaaacacacacacacattatttgttcataagtggagaaaacttttgtggactgggagtgtggaaaaaacagtcaacatgcatttttcctgttctcttacaccataataatacagaagacttctgtgacaaaatatgtaggggtttcttcccacacaccaagtaagcaattagttctgcagtggacacagccgggtgtccaccagttaattcaactgtgacaccatctacctggaaatagcctcagaaaccacaggttgaggaatcagttccacagaactgctccctccttcccaccagtcacgagtctgggcttccagaatgtctgaccagctggcttcaagttggggttaccatgacccaccctcttcggggttgattaatttgctggaggagctcacggaactcatggaagcacttacttacatttaaaaaggatgcaaataaatagccagatggaaagataacacaaggcaagatctggaggagcttccgttcctgtggagttggggtgcaccactcgcccagcgcgtggatgagttctccttcactgtcctgtcagcctccatgcgttcagctatccggaagctctctgaaccttgtcttcttgggccttttatacactcgttggataagcatgactaaagcatggacaaccatgtcaaaatgtgattgggcaaaaagggtatgatttaatactaacagaccgagggtggaatccatcagggcctgtctgctcagattcttttcggcctttctgtgcagcattccttccctccagggtatggggcagggccctctctggaatgagggtcttatgacccacaattagattagaaccctgccttgggcaggtgaaaggagggcaggagaggtcagagagagagaaattctgcttcctgaggcctgtttctaaggcctaaagtgtcccaacattataacagatgactgtaaaagggctatgggagttataggccaggaactgtggatgaaaacttatatacatataattatagatatatatacacacacacacaattatatcacactaacttaatcaggaaagtaatgtattgggggtaatgttgagtagctcatagaatgggtaggatattggagaacttggcttggaaaaatgacaagtgagaaaccagaaacactctgtgtttgtgggcagcaggaactacttggcagtgccatcagggtgccactgttttttttttttttttttttttttgagacggagtctcgctctgtcgcccaggccagactgcggactgcagtggcgcaatctcggctcactgcaagctccgcttcccgggttcacgccattctcctgcctcagcctcccgagtagctgggactacaggcacccgccaccgcgcccggctaattttttgtatttttagtagagacggggtttcaccgtgttagccaggatggtctcgatctcctgacctcaagatccacccgccttggcctcccaaagtgctgggattacaggcgtgagccaccgcgcccggccaaccactgttgatatagatgtattccagttaattttcctatcctcgtctcactctactaaggattcacagtcctaggagagggagtatgaccagctaatcttgtgtcatttgcttgcttcttggctgggagaagttagcgtccctgatatgtcgtactgctgagactgtataccctggaaggaagaagtaattgcataaaaagatgtcaaggtgattttgaaggggtaatggatgctagtagaaaaataaaagcaaaacaagtaaacaagtgaaccaatactcaactcaccagtcacccacccacccactcatccatccattcatctgttcacctattcattcatcctgtcatccatatatcatccattctctcagccagtcaagcaacacaattttattgagtacccatcgtgttccagaggccatgccaggcacttagatacagtaaaatgacaccactcagaaacatcccaagagtatcctcacaaaggacgcagctatgaagctaaaagatacagagaaaggaatgcatatacgtccatgtactggagggttcaaaacaacattgctagggacatggtgactaattctggatgtgggcagataagagctgatttttatgaacatctcatactgccaggagattgcttaacatggggcagaaatgggaccaggattaagcaccagaaaacctgggtcggcctctggtctctgcttctctagaaaaggcatatttccttttccttatctgctcaacaagaagaatgaatataagaatccgtgttttgtctaattcagagaactgtggaggtgaaatgagttaatggatgtgaaggcattttccgatacaaagaaagataattatttcaccacggtgacttctgtttcctgagtggctggtagctctgtggctaatgtgctttgacttctttcacgccctcgctgcccgctatctggtggtaactgtgcaggggtctgttgtgtttcagttccttaggctggtcgatgaatgtccagggtcatcactgctacctgcctcagagaagtggacgcttaaggtcctgtgggccccaaggaagctggaaatagtagctgtgtgagtgtgtatgtgtgggactggggctggtttcttgtatgtgggaatgaaataaccaggggaagttctgaaccatgtggtaggctcaactactttcagcccacaataggaaggagctccaacttgtagccaagccaacacaggagaccacagcttgaggtcagagggtgaagcatatactgtctagaggaattagccctgaacctacagcgttccaggccacaaccctgagtgaggcaagtcggctctctgagccccagttttctcatgtgtgaaacgggtggcttgcctgtaggaaacaggctgttggtggtgctggctcatcttcttcactggtcctaggatgaatttctgggccaggcatgggcctgcctgtttacttctcagctagtctcttccggctttttcctcatctaaaaagcactcccggcagggcacagtggctcacccctgtaatcccagcactttgggaggtcaaggcaggcggatcacttgaggccaggagttccagaccagcctggccaacatggcgaaatcccgtctctactaaaaatacaaaaaattagctgcgcatggtggcgcgtgcctgtaatcccaactacttgggaggttgaggcaggagaatcacttgaacccaggaagcggaggttgcagtgagccaagatggtgccactgcacttcagcctgggcaacagagcaagactccacctcaaaaaaaaaaagcactcccttgactgccttttattattatcactattattttatattattattattattactattttgagacagaatttcactcttgtttcccagtctggagtgcaatgactcgatctcggctcactgcagcctccgcctcctgggttcaagcgattctcctgcctcagcctcccaactagctgggattacaggcatgtgccaccacacccggctaattttttctatttttagtagagacagggtttcaccatgttggccaggctggtcttgaactcttgacctgaggtgatttgcccacctctgcctcccaaagtgttgagagtacaggcatgagctactgcgcccggctgtgccttttattattgatgggctatacattgctacatcctctataaagtttgaaaaaatttaaaagtacatactgtatttaataagcactagtattcctacttctaggaatttatcttacagatgtagtcacatatgtacaacttgatctatacaaaatattcatggtttgtaatagtgaagattgaagtttatcaataaaggactaatgaaataattctggcacttccatataacagaatgccaggctgctactaaaaaaaatgaggaggccgggcatggtggctcacgcctgtaatcccagcactttgggaggccgaggtgggcagatcacgaggtcaagagatccatcctggccaacatggtgaaaccctgtctctactaaaaatacaaaaattagttgggtgtggtggcgcgtgcctgtaatcccagctactcaggaggctgaggcaggagaatcgcttgaacccaggaggtggaggttgcagtgaggcgatatcgcgccactgcactccatgcactccagcctgggtgacagagtgagactcagtctcaaaaaaaaaaaaaaaagggcagtcttcatacttgcagaaatgaataatccctaagacacactagatgaaagaaacaaggaggatagaatggcttacatagtatgctacaatgtatgtgtgtttaaaaagaagagagagactcatctatgtttgtaaatgcttttggaggctgcataagaaattggcaacaattcccttcctgttaggaagggtaatgggagagaggcctggaggacagcggtaggagggagaccttcttttccttgtataccactttgtatctttagaattttgtatcatgtgcatatttgatctatttctaataagtcatgtggtagggggttacccaggtattggagggagaattcccatggagcttcagcccgtcttagagcttcttttaccccctcaggccagtaagagattcaggctctctcagcagaggttgaggtgcatgattcacccagtggctcattcctgccccagccccctcacccaacccctcaccccaccctttaccacatcagggaagtgggcttttagaatcatattttgacaccaaaaacaaccatacgtgccctcccccaaaagaagaagagtgatatttcatcatctccggggaaggagtggtagacattatctcctctgatggagggtatttcatagtggaaacaggatagtctttggagttgtacaaactttggttcaaattccagcctctgctgcttatgctgtaaaagctcaagaaattgctgtgctcttgctggactgtttcctcatctataaaatgaactgactttctactgagcccacgtgactggtaaggaccagataaggtcattgcatatgatgcctggcacatactaggtgctcagtaaatggaagtagttgtgctcacagtcactgagatcagctcagcctactggagccctttatcacaaaggaaggaggaaacagtagtggttggaattggactcagttcagcaaacactgatgccctctctgggcttggccccttgcccagtagaggtagaaaggcacagtgcctccttgccagggatgcacgttgatcagaacagtccgggagagcctcaagtttgcagctgcctctctatagttctgaggtctagagacagtgtggtcagcccaaagggggctgtttccagggcagactcagcattggtgtttgcagtggggactctcttgtcagggaacaggctgagttgggagtgagaatcctggaggttgcttcgtgaagatggtgtgttggaccagtagggacctcaggaacaagcttccccagcgtcgagggctcctgtctcctggcttgtcccctccgcagaggcccctgcagtacaatggcctttcctgccacttgggaattgattttgaagatggggtttgcctgtcagctgcagacacatatctcttttctcccctgatgggcagtggcggagagcatgggcatttagaggaagcagacctgggtctgggttcttgcttggctgttgattcactcagtggccacgttccctaactttgctaagcctcagtttctttgtgaaatgggtataataatattacctactgcttcatgtgaggattcaaaaaaataccccattacaaaaatgtttgtaggcattacacaactattttagcaaagctgcctaacattgagctggctgatctaaaatgagggcaaaattattcttagggagggaattactcttaggattaggggggaaaataccttaatgggcatgtgtgattataaaaagggaaatccctccattccatcccgcccctacctcatattgcctagagagggctaactctgcgtaagaaacaggattggaagtcattcatggtcagtgtgagatggggtaaggatatgtggtggtgagagagaagaggggagatgtgcagggatctagaacacagtgggccagatcctgggaataaaatcaggccagggagagattaatttattctgtcagggaatggccagtggttttttaaggcagggatttttatggctggtatccaaattcaagttctcacctgaattattctgtgctatattcaatacctatcttgtgtgcaaatctccagtaaacatgttacaaccaatagccttacatcgtggttgttttgggggaatgaagaaatgagggccctgaccctcgtggggtgaagcagcatgtgaagaaatggagaattccgtggaagctgggaatcagaggaagaggtgccatgatgtaacaggagccttcagttcttggggatgtagatggggtgagtcttgactacttgcagtatctgagatggagaatgggaatgactttttggatattctggtgaggttccggatgcccacatagcagaggctgccaaatgggcagtttaaaaaggatagaggacatgctgaggctcagatcagtgagaactgggtggggcccaggcagcaagtggctgtgggttctggcctcagcaagagaacagaccacagggtccgccagctgtggcactggagcatcaagagggtcccggagcaaggtgagatgagccatatgtcaacacgtcagctgcagtcagcagaatgagaaccatgccccaccctctgcatgacgccctgcatcctgaagccaccctgggaggtaagaaacagtcctgacaaggagtttgaacttcacattggccatgaatatttacctgaagtgaaactgcttcatttcagaggagctcattttccttaattacccttgttcaaatgtttcttccaccattggtgagagtgggtgctccagtgtgagctcagttactgaaaaatagcaactcttttctgcacgtccaagttgtaacatgtacatttttgacactgctacatgattaatgatgaagaactacccccagggtcacataaacacacagtcctccagccataaaacttccctctcatgttgcagacacacaggctgctttctagccccatcgctgcagacactctaaccacccgtttgtctcgtcaaaatcctgtcagtgcttctgaaaacaggagagaaacactgacagctcacaccctcacttttctgtcctgcagctgctttttgatggctccaaccccttaagaaggcttaatttccctgcagggaccagccaggatatgctcagaaagtaggacatggaattgttttgttaaaaaaaaaaaaaaagtagaaaaaagaaaagaaatggaaaacatagagacagtctgagtcacagtgaggcagggcgtgacctagacacactgggtatcagggtggctggattttctctttactgttccatagaatgtggcctttcccgttctgaaaagtaaaagataatattagctaatgtgtccctcgagccttgttgggaagattaaagaattgaacggtatttggcacattgtaaactttctctctcatcgtctatacttttgctctttctttttctttctccatctcttccactttctccatcagtgacaagttgaatgatagtaccattaaaaatccccgctgtggccgggtgtggtggctcacgcctgtaatcccagcactttgggaggccgaggcgggtggattacctgaggtcaggagtttgagaccagcctggccaacatggtgagatcacttctctactaaaaatataaaagttagctgggcgtggtggtgggcacctgtaatcccagctacttgggaggctgagacagaagaatcgcttgaacctgggaggcggaggttgcagtgagctgagatcacgccactgcactccagcctgggagacaaagcgagacgccgtctcaaaaaaaaaaaaaaaatccccctatgaggaaataggaactttccagttgggaggtggggcacatggaaataggagttgtcataaccccacattttgggcagccatgccaaaaagcagtgtggactttctgcctccttcatctcctgttctttacaaatcagctccaccacttactagctgcctaattctgggcagctggttgacgtttccaaggctgttttcttatcggagatatgaggatgatgctatacactacacaatgtggctatgattaggaattggcctaaaatatgtaacatggtacttggcagatactccataaatgtggctgtttaagctaaaatgatgaagctcaacgggtcaggctaacaatctaggagttgacttttctttctttcccacctttcttaggttggctcctccagaagccgaacctgagagaggatttgagtgcaagtattttttttctctttcttgagacagagtctcactgttacctaggctggagtgcagtggtgtgatctcagctcactgtaacctctgtctcctgggttcaagcaattctcgtgcctcagccttctgagtagctgggattataggcatgcacaaccatgcccggctaatttttgtatgtttagtagagacgggatttcaccatgttggccaggctggtctcgaactcccagcctcaggttatccacctgcctcagcctcccaaagtgctgggattacaggcgtgagccactgtgcccggctgagtgaaagtagtttactgagaggtgatctcaggaagctccagaagggaaatggggaaatgaagtataccttatcttattttagcctcagatcaaccctctctggatattgttattattctttatattctatagatgaattaagtggtggttttaaacatgtccacaattctatatttgtaccatcaagtggtggaaagtaggtcctctgttcttggatctttgcaacattctcaatacgtggatcagaatgattctcaacgctagattagaaaatgttgcccagatgcttgctattctttttgaaatattggctcaggaagcctttgaagtgtagctaccctgagactgccatgctggagagaccatgtggagagagacagagagagagaattaatgtctgactgtaactacctgagagaccccacaccagaacctcccagccaaccctttcctgcattcctaatccacaaaaattgtaagagataagaaatggttattgttttaagcttaaagttctggggtgatttttctgtacagaagttgattactggaacatgatcttgatggggtatggagcatgctaccccaaaatgtggcaccttggcctactgattattttaagctgaaagaaactgagaaaactacagaaacagggaggtcactctctgacctcctcccacctttctcccttgaagcaggctgtaaaagaattctgatctacctcctctgaaaataggtcataagatcctcattccagagaggtcctccccaaccctggaggccaagaagaatctgagcaaacaggccttgataagtcttcccctccctcagtttattaccattagaatatacccttttgtcttctaatcatacttctgcatgactgtacataaaagtagtttttctttagtatttggattttcatttctgaagtctcttgttttatgtaaaacttaccataaataaatttgtatgctttctcttgttaatctgtcttgttataggggcctcagccatgaaactcgcgatgggtgagaaaaagatattatatttcctcccctacaatttgtgcccagatttttctgactgcagagatctccttcaataactccttatttatttatttatttatttatttatttatttatttatttttatgttttgtggcagggccttgcttgtacccccggctggagtacagtggtgcaatcacagctcactgtagcctcaacctcctgggcacgagtggtcttcccacctcaacttcctgagtagttgggactacaggcatgcgacaccatacccagctaatttttgtattttttatagacacagggtttcgtcatgttgcccagactggtcttaaactcctgggctcaagccatctgcccacctcagcctcccaaagtactgggattacaggtgtgagccatcacacctggccaataactccttatttcataaaaactaaaatgcagactcctttgtatggcattcaagtgttgacaatttggccccagactacttttcaacccaaaccccagccatcccagcctgcgacttcattgtgaaacgatagaggggaccaaaaaagcatgagctttgaagagagtgtggtattgtagaggagaaaaagtagttatcttttcctcacccattgtttcatggatgacacccttataacaaaagacagattaacaagaataaagcataacaaatttatttaattttaaaaatcaaagtcttgcgtgacactggaaccttcagaaatgacacagatacccaggggaaaactgctgtttttttatgcttaggtttgatgaagaatgggctgtaaaccaaaaataaaatttgaagcccttcagccatctgaatgggcacctcctctcggccaagggcattctaaagttaacctgaaaaactagttcaggtcatgatcggaaggggggagtcagacacgccttgttaccattcacgtcaaaaagatcttaagactgatagaacagactcttgaagtctgataagaaatatttaaaatctactctctctgaagcctgatacctggaggcttcatctgcatgataacagcttggtctccacaaccccttatggtaacctagacattcctttctaatgattccaggtttttaggtaataactcaaccaattgccaatcagaaaatctttgaatccacctatctggccctccatcaaaaaaaaaaaaaaagtcttcagttattcaaatagttgttttcccatatgtattgtgccacttttctctcctgctttcaaaattctctctttttttgctttcagcagtttgactttgatatgcctaagtataggtttctctgaatcaatcctatatggggtttgctgaccttgaatttgtaaattcaagcctttcagaaaatttgggaagttttctgtaattatttctttatatttttcccacttcattctctttcctctgcttcttcacttcaagtgtccgtatgtcgatgaaaagagttgaactgtaaaatatttgaagagatttattctgagccaaatatgagtgaccatggcccatgacacagccctcaggaagtcctgagaacatgtgtccagggtggtcagggcgtagcttcgttttatacattttagagaggcatgagacatcaatcacatacatttaagaaatacattggtttggtccagaaaggtggaacaactcaaagtggagttgggggctttcaggctataggtgaatttaaacattttctgattgacaattaaggttgagtttgtctcaagacctgggatagatagaaagggaatgttcaggttacgataaagattgtggagaccaaagttcttttgaagtcttatagtggctgcccttagagaaataggtgacaaatgtttcctattcagatcttagtgaatctctttaggattgggaggttctagaagaaaaagatctagctatgttaatagagatgctttacagatacaaaatttctcccacaaagagaagctttgcagggccattcaaaaatatggcaaaataacatgttttggggtaaaatattttgattttctttgtcttgcaatgttatgacacggtcaggctggaaagtaaatcatgatatatagggttaaataagacccatctgatgagaatttacgatttgtagggcatgactcctcagaccccttagataggaattcaggcaagataaaaaaattagtccatacttatgctagatcctttttttttttttgagatggagtctccctctgtcgcccaggctggagtgcagtggcgcgatctcggctcactgcaagctctgcctcccgggttcatgccattctcctgcctcagcctcctgagtagctgggactacaggcgcctgcgacaacacctggctaattttttgtatttttagtagagacggggtttcaccatgttagccaggatggtctggatctcctgacctcatgatctgcctgccttggcctcccaaagtgctgggattacaggcgtgagccgccatgcccggccaatattcacatatttaactgtggtattaggcaaagttgaactacttctgaatacggaagacacatctagagatgaaaataccatcttacaattaaacgaacttacaatgtctgaggagagctgagttggagatggagtcatgggctcttgatagatttggcggaagttcatcatttccaggggtatttagctgctgaatgataatcttttgctggtctttcaaatgtttaaactgctcaggggatattaaaggctgagctggggccctgtgttgagttaaaacttccacctgataggtgaactctggagtcatggtaaccatgtgatccacaggcttaacaatgacatggtgaaatgttggaggctgaacttcctcatgacttacaggagaaactattactctgtgatgctctggaggttgagctacaacttcattagggagctctgaaggctgagctggggcatcttgctgggttggagaagactcgacctactcaggggtctgtggatgctcacctgcagcctcctactgtattggagaggggttctcatctttagtaggttctggagattcagctgaagtctcctgttgaactggtaaaggtccagtctcttccgatgactctgtaggcagaggcggggccccatgctggatgtcagaatgttccacatcattaactggccctgagagctgagctgtagcctcctgatggactggcgaagttcccacctctgcagtaggctgtgttgctatggtgagctgcatatttggaggcttaacagtgacattgggcaaatctcagtgttgaacttgatggtgaccaggaggtggaactgttacttgatgatgttctggaggctgggctggggtctcctgcaggctagagaggactcaacttctccagaaaacccagaaggcagacctggctgctcctgctcactggggaatgttcagcattcacatgaggacctggaggctcagttgtggcctcctgttgggttgcagaaggttacacctgctctggatgctggtttggggccgcctgctgggctggagaagagtcagtgtccgtggtaggctctgaagttatgctaatctctacatctgcaggtttaactgtaatgctcggcaaggtataatgagcttgatcctcaccctgagtttgaactgtcacttcatgattcagtggagtttgagctacactctctatagaagactctggaggcagagttgggggtctcctgggtctgagaaaattccacctccccagaaaactcagaaggctgagctggctgctcctgctgactgggggaaggttcagcctccacaggaggacctggaggctcagctggggtcccctgctgggggcaaaatatttcatctcctcagtgcactctggtgtctgagctgggccctctaattgggttgaggaagagtccacctccctggggttctctggaggctgagctgcagccttgtctaccaaatttcaaccatacctgtaatcatgactttgcctagactgtactcccatttgttttctatttaacaaattatagctacactttaagtcccaagtaagttttagcttattgatgtagctttccctgatctccacacctcaaggatcacagattctggtgaatcctagcaccgatggtctgcattatcttgtagtatttcattatatatacctccttttcatgcctagtctctttcttccctcctatcattttcatttctgaagacagtatcatacttggccaagggttgacagaaaacgactgctacagatagaaagccagggacaaagatgcgttctggacataactaaaggactgagtaatcatgttagcagccaacactcccacatatgctaggcaccgatgtaagcaatacatgtatgcactcacttaaatctcacaacaatcctatggcatggtaactagcataatccccagtttaaagacgaggaaactgagtcacagagaagaataacttgctcagggtaaccaagctaataaatgacagacctgggttcaaacccaggcagcctggctacagaatcaactcttaaccacttagagcatcatcactgagatgggaagagggacaggctgctgtaaagagggtgaagtgaaaatgggaggagagccgctgttaagcaatgatgtgatggggctaaaggaaagtggataagaaaagggttaagagcaatcacaagtaaaagaccagagaaggggcctaacagtaaaggagaaccaggagaaggaagaattgacaagaaaggtgaaagcagaaagtccgttgtcagttcggtttggtgagataaaggaggcccaggaaggcctccacgaaaaggctgtcatgtcaggcaggacacagaacaattgaggaaagacgattctcacaggatggtgaaggtgtcattgcaggtgctgggctctggtacaggcacttggtggagcctctgctttgggctgagatcaatacatgagagtgtttcatctctgcaggtatagagatcacatatgttggtgcttgtagaggccttcggttcctcctgtgcagttaaagccttattttgggcataactttcagactgcaccagtgaattctgagtaggttctagttcagaaggtgaaatgtgtgacttcagtcaggtttcaatgctgagtctgaacttggtctggatgtggagctgtagtcttgtccaggcctgtagaatgttcagtctctatggtgagttctggaactatggcaaatcccaggtctgaaggctgagttgaggtctcctccatggttggagaagttttaacctctgtagtaggttctgtagttatggtaagctccaggtccaaagattgaactgtgaattgagtcaggtttggatgctgagcctggttcttgtctggaggtggatgtgtcatttcaggatgctttggaggaggagctgtagtcatcggggctgtagaagggcagagcttgatcttggcttggtgttggaatgggtatctgataataatacacaggcggttgagctacaaactccttaggtagctctggaggccgagttggggtcttctgcatggttggagaaggctcaacctccatagaggattcaacctccatagagttaaggtaagtttcagacccaaaggttgaactgtgacttgaatcaggtttgaatgtagagtctgaacctggtgtggatgtggaagtgtcatctcagggtgctttggaggaactgtagtctttttcaggggtgtagaatgttcaacctctgtagtgggttctggagttatggtaagtccaccaggtccagaggttgaactgtaacgctaggtgacattggatgctgagcttgatcctgacccggtgttggaacactcacctcttgatatactggaggttggggtacaaattccttaggaggctgagttggggtctcctgcatggttggagaaagttcaatttctgtagtggattctggagtgatgataaaccccaggtccaaaggttgaagtgtgacactggccagtgttgaaagctgagcttgatcctgaccttgtgttggaattgtcacctcataacgaggtggaagttgagctacaacctccgtaggtggttctggaagttgatttgagttctccatggttggaggaaatatattctctgcagtaggttgtggagttgtggtaagtttcagatccaaagtttaaactgtgacctcagttaggtttgtgtgctgagcctgcacatggtctggagttgcaagagtcacttcagggtgttttggaggaactgcagtttttctcagggttgtcgaatgctcagcctcctttgtggatactggagttatagtaagccctaggtctaaaggttgaaatgtgacactgggtgacactggatactgagcctggtcctgccttgctgttgaaattatcatctcataatgcattggatgttgagctgcaacccgcttaggtggctctggaagctgacctgggaccatctgctggcttgaaagttctatattcttggggggctctgaagcctgaactgtggcctcctgctggtttggagaaggctctgcctccatagggggtatggagtctgagctggaaagttttgctgagttagagagggttccacttcctgagggagctctggaggcaaagatgggctatctgctggactggagagggttctaccacaatagagggctctgaagactgagcagggactgcctgctggactggagagcattctacctttttaagtggctctaaaagctgagttggggcctgctgtaggactggagatagttcaaccttctcaggtggctctgatggctgagctggtatctcctgctttggtggaggattgacctcttttgtggacttcagaggatgacctgaggcttcctgctgggttgcagatggttcaacctccttagcaggctctgttggctcagctggaaactcttgctggactggagaaggttctacctccttagggggatttggagtctgagctgtagcctcttgctgggctgaagattcactctcttcaggagactccagaggtagggaaggggaatcaggctgggctagagaaaagtcagcctgctcactggaaataggagggttgtcctgctggactggagaaggttcaacctctatagtgactgctgtaggtatggtaaactctatatccacatttttaactgtgattttaggcaaagttgaattatttctgaatattgaagacagatcttcaggtgaaaaattccatctcatcattcaatggacttacaatgtctgaggagagctgagctggagaccaagttgtgggcttttgagcaagtggagaaagttcatcattttcaggggtagttaactgctgaatgataatctcttgtgcatctttcaaatggttaaacttctcaggggacattaaggactgagcttgatggtgagctggaggtgaaactgttacctcataatgttttcaaggctgagctggaatctcctgctgggctggagaaaattcaacctcccaggagactcagaaggctgagctggctgctcatgctcaccgggaaaaggatcagtctccacaggagaacatggaggctcagttggggccttctcttgggttgtggaagtttccacctcctctggaggctaggttggggcctcctgctggactggagaagattcattatccttggctctcaagttatgctaatctctacatccacaggcttaactgtaatgcttggcaaggtataatgagctccatcctcaccctgacgttaaattgtcacccatgattcggtggagtttgagctgcactctccatagaagactctggaggctgaactggggtcttctgctgggtctgagaaggttcaacctccccaggaaactcagaaggctgagctggctgctgctgcttactggaggaaggttcagctgccacaggaggacctggaggctcagccggagtcccttggtgggttgctgcagatttaatctcctcagggtgctctggtatctgagctggggcctctaattgggttgaggaagagtccacctccttgggtttctctggaggctgagctgtgggtcgttctactcaatttcgaccatacctgtaaccatgcctttgcctagaccgtactcctatttttttcttatttaacaaattatagctaatttttaagccccaggtaaagtgttagtttactgatgcagcttcccctgacctccataattcaaggatcacagattctggtgaattctagcactgatggtctgcattatgttttagtactttattatttacacctccatttttatgcttattctttttcttctatcattttcatgttccagagacagtgtcatacttgtccctgggttggacacaaaacgggtgctacatatagaaagtcagggacaaagatgagttctgaacataactaaagagctaagtaatcatgttaacagccaccactcttacatatactaggcactgatgcaagtattacaggtattcactcacctaaatttcacaacaatcctatgaaatggtaactagaataatccccagtttaaagatgaggaaattgagtcacagagaaaaataacttgttcagggtaaccaagctaacaaatgacagacctgggttcaaacccagtaacctggcttcagaatcaactcttaaccacctagagcactatcactgagatggagagacagactgctgtaaagaggatgaagtgcaaataggaggacagcagcagtgaagcaaatgatgtgatggggctaaagaaaaatggataagaaaaggattaagagcaatcacaagtaaaagaccagggaaggggcctaacagtaaaggagaatgaggagaaggaagaaatgacaggcaaaggcagaagcagaaagtcagttgtccatgtggtttggtgagataaagaaggcccaggaaggcctccaggaaaaagctgctatatcaggcaggacacagagaacaattgaggaaaggtgattcttacaagatggtgaagatgccattgtaggtgctaggctctggcacaggcacttggcggagcctctgctttgggctgatgtcaatacatgacagcgtctcatctccgcaggtacagagatcacatatgttggtgcttgtggaggccttctgttcctcttgtgcagttaaagccttattttgggtgtaactttcagactgaaccaatgaatcctgagtaggttctagttgaaaggtggacctctgacttcagtcaggttttgaagctgagtctgaacctggtctggacgtgaagctgcagtcttgtccagggctgtagaatgttcaatgtctgtatggggtctagagttatggcaagccccaggtctggaggctgagttgaggtctcctctgtggttggaaaagtttcacccctgtagtaggttctgtatttatggtaagttccaagtccaaaagttgaactgtgacttgggtctggtttgaatactgagcattgacctttgtctcgtggtggaagtgtcaccttagggtgctttggcagaggagctgtagtcatcatggctctagaaggttcaacctttgtagtgaattgtggagtaacggtaagccccagatccaaaggttgaactgtgacactgggtgaggttggatgattagcttgatcctggccttctgttggaagagacatctcataataatacccaggagggtgaactacaacctgcttaggtagctctggaggctgagttggggtcttatgcatggttgaagaaggctcaacctccatagaggattctggagttaaggtaagtttcagatccaaaggctgaaatgtgacttgagtcaggtttgaatgctaagtctgaacctggtgtggatgtggaagtgtcacctcagggtgctttggaggaactatagtcttcttcaggggtgtagaatgttcaacctctgaagtgggttctggagttatggtaagtcccaggtccagaggtttaactataatgatgggtgatattcaatgctgagattgatcctgacctggtgttgaaattgttacctcttgaaatactggaggttaaggtgtaacttcctgaggatgctaagttgcggcctcctgcatggctggagaaagttcaacctttgtagtggattctggagcgatggtaagccccaggtccaaaggttgaagtgtgacactggccagtattgaatgcggagcttgatcctgatcttgtattggaactgtcacctcataatgagctggaggttgagttacaacctccataggtggctctggaagctgagttgaattctccatggttggagaaaatatactctctgtagtaggttgttgattcgtggtaaatttcagatccaaaggttgcactgtggcctcaggtttgtgtgctgagcctgcacatggtctgaaggtggaagggtcacctcagggtgttttggaggagctgtagtcatcctcagcattatagaatgctcagcctccatagtgggttctggagttatggtaagctccaggtgtaaatgttgaaatgtgacactgggtgataccggatactgagcttggttttggcttgctgttggaattgtcatctcataatgctggatactgagcttggtcctggcttgctgttacaattgtcatctcataatgcattagaggttgagctgcaacccccttagggggctctggaagctgagctgggaccatctgctgacttgaaggttctgcctccttaggaggctctggagcctgaactgtggcctcctgctgagctggagaaggttctgtctccatagggggctctggagtctgagttggaacctcctgatgagtcagagatggttccacctcctgagggagatttggaggcaaagatggggccatctgctctgtcgaagaggattctaccaccatagggggctctgaagactgagcaggcactgtctactggactggagagcattctacctcttcaggtggctctaaaagctgagttgaggcctgctgtaggactgaagatggtttgaccttctcaggtggctgatggctgagctggtatctccagctatggtggactgacctctgcagtggactttggaggatgacctgaggcttcctgctgggttgcagtggttcaacctccttagggagctctggtgcctcagctggggactcttgctggactggagaaaatccacccctttaggggaatctggggtctgagctgtggcctcttgctgtgatggagattcaatcttttctggagaatccagaggtggggaaggggtatcatgctgggttggagaaaagtcagcctactcagtgggaataggaggattgtcctgctggactggggaaggttcaacctccatagtgacttctgtaggtatggtgaggtccatatccatatttttaaatgtggtattagggaaagttgaattatttctgaatattaaagatagatctagaggtgaaaataccatctcatcattcaatgaccttacaaagtctgagctggtgactgagttgtgggctcttgagggactggaggaagttcatcattttcaggggtatttagctgctgaataatcatttcttgctggtctttcaaatgctgaaactgctaaggggacattgaggactgagctggggccctgtgtttggttaaaatttcaacctgttaggtgaactctggagtcatggttaccatgtgatccacaggtttcacagtgtcattgtgcaatgttggaggctgaacttgatcatgacttagagaaactgttacctcatgatgcactggagattagctataacttcaatagggatctctgaaggctgagctggggtctattgctgtgttggagaagactcaacctcctcaggcatctgtggatactcagcagcagccttctgctgggctggagagaggttctcatctttaatagctggagattgaactgaagtctcctgttgaactggtaaagtcatcttctgatgactatggaggcagagttgggcccccgtgctgggtcatggaaggttccacatcattaactgcccctgagagctaagctgtagcctcctggtggattggagaagttcccacctctgcagtaggctctgttgctatggtgagctgcataactggaggcttaacagtgacaatgggcaaatctgaatgctgagctttatggtgacctggaggtgaaacttttacttcatgatgttctggaggctgagctggggtctcgtgctgggctggagacgattcaacctcccctgaagactcagaagtctgagctgtctgttcttgctcactcgggggagattcatcctccacaggacttggagcctcagttaaatcctgttggtttgcagaagtttccactccctctggaggctgggttgggacctcctgctgggctgcagaatatttagtctctttgataggctctgaagttatggtaatctctacatccacaggtttaactgtcatttgtataatgagcttgatcctcaccctgagtttgaactgtcacctcataattcagtgcagtttgatatgcactctccatagagaactttggaggctgagcggtggcctcctgctgggtctgggaaggttcaacctccccaggaaactcagaaggctgagctggctgttcctgctcacttggagaaggtctggcctccataggaggaactggaggctcagctggggtcctgtgctgggttgtagatttcatctcctcagggcactctggtgtctaagctgggtcctctaattgggttgaggaagggtccatcttctcagggtgctctggaggctgagttgtggcctgttcccggcttgatgtaagtttcttatctggctttggacttattgtaagctccaaatccacaagtttgactgttacattgggcaagtgtgagtgatgagcttcactccaactttttttgtttgtttgagatggagtctcactctgtcgcccaggctggagtgcaatggtgcaatctcagctcattgcaacctccacctcccaggttcaagcgattctccttcctcagcctcctgagtagctgggattacaggtgctcaccactacacccagcaaacttttgtatttttagtagagacagggtttcaccatgttggtcaggatagtctcgaactcctgatctcaggttatccaccctctttggcctcccaaagtgctaggactacaggtgtaagccactgcacctggcctcactccaactttttaatgcaacatttacctgataacgtattcataactgagctacaatctcttcagggcaggtagcagctgtgttggggcctcctgctctgttgaagaatggacccccttaagggactgagaaggaagagctggggcctcctacggggttgaagaagtttctacgtattcagggacctgtggaagctgtgctggggcttcttgctggagtgaagatgactggatctcttggagggtctgtggattttgagtttcgggctctagatagaattggcaaaagtccaacttgctcatggggccctggaggctcatctttcacctggacttctggaggaaggctgcccagatacagtatatccatacctgaatctaaatactaaatgcttgtaaagtttgtttctgacactgaggttttgatacaaatcggtgtggagttccaacaacaaccttagcaagcctccgatgcttaggtagatctttcttcttcaggtttttgggtgaaacactaatcttcattgcttttgaattctgactatctagaggtggaacaagtatttcatatgcctaatgatctgcagcctgatctagacttacagtttgaaccttacttttgaggcaaagaggccgagctaccgtctggttctgatcccagtctagcattggaaccaactctgggagcctttcttgtgagtcagcttatcattcagatcctggtgtgcaacagcgaacttctctggccccaggggcagctctccagctgaatctgtgtccagaaatggaaccaaagtctcagtcggttcctgaggcgaggctgacatctgggtggcagtagaggacctcaggttatcaaagctcccgggtctgtatgggggtgggggtggataaacgcatagggaggttccggggggagatcggaggagcgccaagcccagggctcagttggcctcagggggtcggaggtcagctggagtgggccctggacccactccagaggctgagcctcctggactagtagtcacagtagttgtcacgtgaggaggggccatagggaccagagacgcagccggtacatgacagaagttggcgtcccgcactgagcagaagccattatggcagccaccagatgcccgcgcccttagcaaccgcggccccgcctcgtccgttatttaccatatctttatctaggcaacctttattaagttccgttcgagatccgctcctcgtcaccagggcgatcttatcccacaatcctacccaagcctcccttcccactccaccagaacaccccttccctccccttcgccaggaaagatttgggcggccgacccaggtggttccaggactccagcagcctatagtggtggggcggcgtggggtaggggcacgacagagcttcccaaggaagttacatgacctcgccttgggatattcagaaatgctagtcaagttctggcagcctgaactcttcctcctccaagctgaaatccgagagatacccttcctcctcttggccatactgcttccagggagagcaagggacctgcaaaatgtgcgctagttagggtggcaggcagaacgcacattacggtcattcattccaaaatgttgccgtttttgctaaactttccatatcctttgttgcatgtttgataattcaccactctattaggtaggggctgccagggaataagtgaagactccaaattttctgtaggaggggttttgggaggtgggcaattcagtctgggagagaagtttgaactgtcatcctgccttgacttaacacagccattaccctagaaattacagcgccactcttcagaggtctaccctgtgtgcacacatggagaagaggcttaggttgttaaagtcagctgttaaataatttcctgaaatgcgactataactggaacccagctgacttcctccacagccattgttacctattttattactcattgtctggcacaatcaccagcatgtgaactctaagaacgtgcttcatcttatgccagtgcctagcataggtatatggtgcagattaatggttttacaatggaagggattccaagacttgcctcatttagggatggatctattgttataatcagatttctgaaatcagtgctgactttctctcacatttcacaggaagctagacttcttaaagcttgaagtttccttgatgggttttatttaaattgaattaaaataactattttacagggaaaaacttcaaaacaaaacgctttgcaactttggggtgaaagttaaataaaacactctagccccaaattaagttcctactgaaaaaaaacacttttgctactttttttaaagaattccatatgtagtaaataatgactgttttctttcagagattaatttagaaacttaatccctatttaagagctttcatatacagtcatgcgttgcttgccatgtgaggagaagcttgagaaatatgtcattaggtgatttcacccttgtgctaacatcatagcatatacttccacaaacctaggtggtatagcctacagcacacctaggctatatggtatggcctatggctcctaagctataaacctgtactgtatgttactatactgaatactgaaggcaattgtaacataacggaaggtatttatgtatgtaaaatggaaaatgtacagtaaaaatactgtttaaaagataaaaaatggtatagctgtatagggatagctccattatactcttatggaaccaccatcatatatgtggtctattgttgaccgaaacatcattttgtagcacatgattgtaactgatttacagaaagatctcagcaaaatattctacccaagatatacgtgagatattgagatccaggtaataaactgtatttgaaaggcattatagttttcgaaagctgtagcacgatcattcttaaggccagttactttctccccatatctctgggattctgtttgaagaaagttctaaaaaggcctgtgttcaagcagcctggaatccctaactcctgggggaagactaatccctctcctgtgtccacaactgtagtaatactctgatagtcctcagttctcctctccaaacttcaaataagcggtcagagccaaaggtcaagacttcaggaaaagccccagaaatactctgcactcaaaagtagtatcagtttcacattttcctaagaatgaaacaaattatcctccaaattatgctgcttttttttgaattatggttacactggctatgttacccctgagtttttatcttcacatacttgaattaaaccgtgtagttcttcttcgcatctgacacctacgatgtcttcactgggtctgtactccacagctattttaccactttctgaaataaagttagcgaggatcaattcagaatctttttcattctaaaacttcctgcatataatggtagcaccccatgatgaaacattgttttggtttctaaaagcagaaaataagagcattttcctggaagtttccttatctcctcatctcacacttcagttttttctttctttctttctttctttttttttttttttttagaagacagggtctctcactctgtcacccagactggagtacaatggcactgtcacagctcactgcagcctggaattcctgggatcaagtgatccccctggctcaccctccagagtagcaaggactacaggtacacaccactgtgcctgcctaatttttttttttagagacgtggtcttgctttgttgcccaggctggtcttgaacccctggctttaagtggtcttcctgccttggcctcccaaaatgctgagattacaggtgtgagtcaccatgtctggcctcacacctcagtttttaacatatgtatgaaatatcaaccatattcggtacaaaggactttatgatcttacagataggaactaaggaataacataagaaataaaaaatgtggaaaccaaaatgctcaatcataatatgactaaatggtaaggcatcagatgggggtcaaagcaagttcaaatttggaatagagaccactgggctagtagacacttcacattagaagcaagggccttcttttgtctactcaggtgtctactccttttgaaccaaaattcattccaccagatacaatgaacaaagcttctgagagagagaacatttgaacattttattggcagacacaggctcacatacccttatagacaatagaactaccttcaaggcaaactagagccatcaggcttttggtctaagaagttttcagtgtgtgcaagatacctttgtatattagggagaggtaaacaacacacacacttcgtttggttcttaaatgttgttactcagacttgacagttgatgaccaaggaagtaagactttcactagaagggctgttgcccaggttggaaagctgagagcagtcagggccacctcctacaagcaaataaaggtctgtggtaacttaattaggatctctcagtctctaagcctttagggctgtgaagcagaagagcaactctgttcagggactctttgctaatcattaggcttcctttgggcacagcctataagattcgtgccactgtagaactcaatagggaatacaagcaatagggaatatattcaatagcatgaccaattccaaggctcacggcaaagcagctgatttttgtataagaatcatacttgcccaatgtgtcagtgccagaaatgaaagctgaaactgaattcttgattcaggaaacataatctaataaactcttcagcagagagcttatttattcagagataaatcaacaatgacaataatagttaatatgtctgcttatcttgtaagtgtagctccgagtttttacatttgtcatctcatttactcttacaatgtcctccataaggctgactgaattactaaccccagtttatagatgaagagactgcagcttagagatattaagtattttcaaatctctctggctataagacctaaaattgcattaaaaaatcttttttttttttttttttttgagatggagtctcactctgtcacccaggctggagagcagtggcacgatcttggctcactgtaagctccacctcccaggttcacgccattctcctgcctcagcctcccaagtagctgggactacaggagcccgccactacgcccagctaatttttttgtatttttagtagagacggggtttcatcgtgttagccaggatggtctccatctcctgacctcgtgatccgcccatctcggcctcccaaagtgctgggattacaggcgtgagccaccgcgcccggcctaattgcattaaaaatctaagagacagagttaggactcaaatccatgcgtccaaaacttataatcactattctgtatgataggtaagcaattaaagaagacctggcttaaacattttctgtgggaactgaggcaagtcttttcacatctgtaaactggggacaatatttgctgtcattttttttcacaaatgtcacacagaacaaatttgagcctgttggtgtgaaataatttagcaaatgaaagcatactatagagtgctttagatatcaatatttttattcaattaacttttcaaaatgagtttatttgcttactgaaactgaagtacttcaaggatgatcaagacagtcttacctagaacaacaatcaacagtttctggaatgcatctgacaaagccttctgaatagcaagcttctgggctgtcttccttttcataaggaatgataatggtcctaaatccaaccaaaacaaatggatttaaggtgcctatttgaatgataattgctatatgtttaaaaaataaaaaagcatccacgattcttagctcaaaaccttcatgactaagggcagatggcacaagcgtatggttgaatggctctgttataggtacatcctggcagggcccatttttactacctccatctagtagggaagttcctgaggtactagaagggagataagagccaagaacctggcacatgtctcacatcacccagagatttcaaattgatcagttaaggctacactcctacagaccctaccctcctatgcatcaagggctggaatcactcatcgaaaaaggtttggttggctggacctggtggcccatgcctgtaatcccagcacctggggaggctgaggcaggtggaggccaggggctcaagaacagcctggtcaatgtggtgaaacttgaggccaggagttcaaaaacagcctggcggacatggtgaaaccctgtctctactaaaagtgcaaaaattagccgggtgtggtggcacacatgtgtaatcccagctacctgggagtctgaggcacaagaatagcttgaactgggaggcggaggttgcagtgagccgagatcatgccactgcactccagcctgggcgacagagtgagattctgtctcaaaaaaaaaaaaaaaaaaaaaagaggctaggcacagtggctcatgcctgtaatcccagcactttgggaggccaaggtgggcagatcacttgaggtcaggagtttgagagtagcctgggcaacatggtgaaaccctgtctctaataaaaatacaaccacaagaaaatagccaggtgtggtggtaggcacctgtaaccccagctacttgggaggctgaggcaggagaatcacttgaacctgggagatggaggttgctgtgagccgagatcacgccagtgcacttcagcctgggcgactgagtgaggctccatctcaaaaaagaaaaaactttggtacagataatctggctcctccctgggcatcacccccgggagcctactccactccattagcctacagccctgcctctgacttcaaaccctaagcatgatggccatgaatactaaaaaaatactcaacatcagtatcaactgagtaccctttctaggtatctatattagacactttttctgctgaaacccttttatgagtaaaaaaaggaactgaatgtttatacaaaagtttatgtaaatctttagatgatgacctggcatggtggctcatgcctataaccccagcaacttgggatcctgaggcaagaggatcacttgaggccaggagttggagaccaggtgggacaacacagaaagaccccatctctaaaaataataataataataataattaggcaggtgtggtggtgcacgcctgtagtcctcgctactcaagaggctgaggcaggaggatcccttgagcccagaagttggaggttacagtgagctatgatcatgctactgcattctagcctgggcaacagagcaagatcctatctctaaaaaataataaatagataaaaaaaaatctttagatggttttgctgggataaccgagagctacaagagacacatatttgaaggactattttagttcgaagcaagttcttaaccaaaaactgtaaaaacattacttccttcttcctcctaagcttctcggcaggaagtcagctgtacgattttaaatttaaaggttcaatcaggtattgcctacagtaaaaccctatgttgtaagacagaaaaactctgcccaggacttcagtagctcagagagggaggggcttgatatgtatctgaaaagatgagttttggaaagtaagaaaaaaagaaagatcctttccactccaaatccctaccctcctccactcccagtgaaaacagaccttcctccaccttatccataggctcctccaccaagccaatgccaggactcctgcaatcacaggatggcaacaccacttctaaagcacagaagaacttcaggctttgcttcggaagtggcaccatgctatcttcattttccctttcttcaaggtcagaaagctcctgaagctgtaaggatatttaatgtaaggtccttcctggggtcttaatgtaggcttcaaaatgttttgttattaaaagtaaaaacttggctgggcgtggtggttcacgcctgtaatcccagtactttgggaggccgaggtgggcggatcacgaggtcaagagattgagaccatcctggccaacatggtgaaactccgtctctactaaaaatacaaaaattagctgggcgtggtggtgggcgcctgtagtcccagctacttgggaggctgaggcaggagaattgcttgtacccaggaggcagattttgcagtgagctgagatagcgccactgcactccagcctgatgacacagcgagcctctgtctcaaaaacaaaacaaaacaaaacaaaaacccaataaaaaaaagaaaacccaaaaaacaactacactccagtcattcaagctaacagttgaggtgtcctatggcttcaaaatcaagttagatttgcaaatgaattgctagatagagacaaccattttttattatatgccacaaaaacagtggagaaaattacggataccaccatccaattgactgagattattaattctaggtagcaggccaattcagacatgtcaatttatcctcaatggtagaggcctctcacatctcctccctacaatccagttcaatacttctgtctaaaatctaggatttcaatgttgaaaggagagtgtggtaagtgaaaaaaaatctacaaggtttaccttgatgatccttttggaacacccattgaaaccaaagtagtaattcgccagttcttggcatttggaactgttcagggcaagggcttgatgttgaactgccttatgtctggtgccaagacgaacctaaaatcataggagatagacccataaatatcacaaccgctagagattttattttggatagatctgagatttgtcaataccaagtgtgcaatgaaaaattgttactgtcttcccattcagtagttcctgcttgagaatatgacctgaatatagataagatgaacccaccacccatccccctccccaagttactaacccgttaaaagatgaaataacaccaggtgcagtggctcacccttgtaatcccagcactttgggaggctgaggcaggtggatcacaaagtcaggatatcgagaccatcctggctaacatagtgaaaccccgtctctacgaaaaatactaaaaattagccaggcatggtggcacgtgcctgcagtcccagctactcgggaggctgaggcaggggaatcgcttgaacctgggaggcagaggttgcagtgagccgagatggtgccatgcactccaccctaggtgacagagtgagactgtctcaaaaaaaaaaaaaaaggaaatacaaatacttctataaattttacatgcaactgaaaggagaggtatatctgcatttacgtgcttctttgagaacgcaaatatctactgagtgttaattcttaaaacattttatccatttttgtggatttcttacatcacaagttttcctatatatttcattttttaaatgtagtatattatattcatgaaattcaaatgatacaaataaagtcaaatttatttgtattagaaattaataagaattaacagtaaagttctttttttttttctgagacggagtctcgctctgtcacccaggctggagtgcagtggcgcgatcttggctcactgcaagctccgcctgccaggttcacgccattctcctgcctcagcctcccgagtagttgggactacaggcacctgccaccacgcccggctaattttttgtattttttagtagagatggggtttcaccgtgttagccaggatggtctcgatctcctgaccttgtgatctgcccgcctcggcctcccaaagtgctgggatacaggtgtgagccactgcgcctggccgtaaagttaattctttattgatttgtttatgcaccttcctctatcactggtttataagctccttaagtcccagatgaaaccatagcttattcttttttcatttccagaactaagcatagttcttggcatataatagagcacagatgatctatcgattgaatgaataaaacaatgagcaagtaaaaaatgaaattactttctccaactgaaaagaaggagaaatgcctgttgggaaagaaataaagaccagtttttaaacgttgagtgccactggcgagaccggcctgtatcgtgagtcacagtggagcctttccagacaaccaggaagcttcagaaaaactctgagcctctgggtggcacagacagctgtcagcttggataactttgcagcaaccattttccttcatttcaccaaaaaaaaaaaaaaaaaaaaaaaaagaaccaaaaaaccctcttggccgggcacggtggctcacacctgtaatcccggcactttgggaggccgaggcggcagatcacttgaggtcaggagttcaagaccagcctggccaacatggagaaatcttgtttctaccaaaaatacaaaaattagctgggcgtggtggtgcacgcctgtaatcccagctgctctggaggctgaggcaggagaatcaattaaacccgggaggcagaggctgcagtgagctgagatcatgccattgcactccagcctgggtgacagagcaagactccatctcaaaaaaacaaaacgaaaaaaccaaacaaaaaaacaaaaacccaaaaagcaaaaacaaaaccctctcaggtgccttaggcctttccttgattttattttaaaacattattctcttttctgtatttagaaaggcaaaaaagacaggaactaagtgtacgtgctaaagtagaaaagaacacttaaactagattacagtggggggtgagtagtaactgaaagctttgagtttagtaataaatctagtatgaatgccctctcatctcacctatctattgagttgtagaacatttccttcattactgtctcagtgataggctttatgctgtgaaattctcaaaacctaaagcttatgaaatggtctcaatgtccaaagagcactaaaaactcattatttgcaaaatgataccaagtaaatgtttcataatcttagttgtacctttataatatttgagtggctatgtgaaatggtcacaggttagaaacagaccatagttcaaaagttaaataatatctcacaggtaatcatttcagtcacagaaagtggaaccaggattgaagagggtgttgaacaggctaagagggcattgaacaggctactgaagtgggagtagtatacctggagtcattactaagcagagttctcagatttgatcaaggttaattcaatgaggaatggaatatagagaagaataggcagcaagattagtaggaagcagtcagatcaagtagccaatcaggaattgaaatggtccttgaaaagggaaagatgactgaattgaggcatacaatgagatatcattctgtggctctgggaaagtaaaattggttggcatgttaatatggaatagggtttctacaataccgcttaaagaatgttcccatcctctcagaactgaagggagtttcaaacaggcagtttgtgagccatggtgagtatgatgatgatgatgtgatgatgatgatacagtctcctttatgtaacagctggcagaagacctggtcacacccacacattttaaattcacataaaactaaatatataggctgggcgcggtggctcacgcttgtaatcccagcactttgggaggctgaggcgggtagatcacctgagttcaggagttcgagaccagcctgaccaacatggagaaacaccatctctaccaaaaatacaaaatcagccaggcgtggtggtgcatgcctgtaatccctgctacttgggaggctgaggcaggggaatcgcttgaacccgggaggcggaggttgtggtgagctgagatcacaccattgcactccagcctgggcaacaagagcgaaactctgtctttaaaaaaaaaaaaagtaaatatataatatatggctgggcacagtggctcacacctgtagtcccagcactttgggaggctgaggtgggtggatcacttgaggtcaggaattcgagaccagactggccaacatggtgaaaccccatctctactaaaatacaaaaattagccaggtgtggtggcaggcgcctgtagtcccagctactcaggaggttgaggcaggagaatcacttgaacccggaaggcagaggttgcagtgagccaagatcatgccactgctctccagcctgggtgacaaaatgagactccatctcaaaaaataaaaataaaaagtaaatatagctgggcatggtggcctgtacctagctacttaagaggctgaggcaggaggactgcttgaggccaggatttagagaccagcctgggcaacacagggatactctgtctctaaaaaaattaaaaagtaaatataagcagaagtcttctggcaaagatttcattcattcagtcattttttagagatagggtttcactctgtggcccaggcaggagtgcagtgatgcaattattgctcactgcatcctcaaactcctgggctcaagcgatcctcccacctcagtctcccaagtagctgggactacaggtgcatgccacatctggctgatatttaattttttatttttctttctttctttttttgagatggagtctcactctgtcacccaggctagagtgcagtggcacaatctcgggtcactgcagcctccacctcctgggttcaagtaattcccatgcttcagcctcccgagtagctgggactacaggcgcatgccaccatgcccggctagtttttgtatttatagtacagatggagttttgctatgttgcccaggctggtctcaaactgctggcctcaagtgatcagcccgcctcgatctcccaaagtgctgggattacaggcatgagccacggtgcccagccttatctttacaattttttttatagagatggggtctcattttgttgcccaagctgagatttcttaaaaagggacagcataaaatgacatgaggtttagcatcagtaggttttagttcaatctcgagtttccataattcttgtcaggaaccttaaacaagtcgctcaaccaccttgagtttgagtttcttcatgtaaaaaacccagagaactggaagattagtgtggcaatgcatctgaaaatattctgtaaaccagcgtgctggacaaatgctaacctattattgaattcagcacttcatttcagcggagctaggaattccatatttggacccaccttgactggagatttctgaaaaagctgcttccggtcgcatgccttttgggctctgtgggcagcccttgcagaataaaacttaatgacggcatagaaaccaggatgggccactgcagcatttgggaagacccggactgaatacagaaggccaaactgagaaaatgctgtgaacagagaatgctgtgggggtgggacaagtaaatgcatgaaatctcacgcccagaaaacaaaaccgcacatgccctcatattccccaaacctctcttcgcgaaggatgcgattcaaaacacttcccacttaatcaacaggttttcctcttaaaatcctaaactttaagaagcactggaaggtaaaacgttctgaaggtggagagatacctctccgggactctaaaaatctgttgggggtcgtcagttgtcagttgggatcccctttataattaagagtccttcagcggaggctcaggcaggtgagggtctgaggcaggactccggaactcccagtcagcgggtgggcagctttctccatccctccctccatcctggccccggctcacatgcaaagcctcggccgtgggtccggagctcagctcccacactagcaaggttttgtcactctcgatgggaaccgcaaaaggtaccaactccgccatcctcccttcaccgcacctgcgcggctaaccctcgccccagcattgcgcctgcgcaaggcacgcccgcgcttttttaaaaagaggcgcatgcgaggggcggggacggggctcggatcgctcccttgcccctcctacctagggccagcctctgagtctgttcccctcctccagtcacagccacaagatccctgagtttagagcttccgttcaatgcatgtttagggtaaagtcccaaaataggctgacaggatggaagggtagggacgtgtttatagaagccagcttcatcttcactcctgaaggagattagggtactaagtattagcacttgtgggaaataaccacgaaagatgcaatcttttgacttaagaggtttttttaagagtttaaaattgcaaataaaagtataactcactaaaccattaacagtctcgcatgaaatccttaaaaagaattccctgattgtcctacgtcattctggtgaatcgtgtatgtgtacttgtgggggtcagatgatgtgagaggttggaggtacgagtgagaaggagagattaattttgaaaaaagaaaaacaaacaaacaaacaaacaaacccacaaagaataagtccaaataaggcaccaacattggagctgatggtgtctgagaagggtaggtgtcataatcagctacgtggtggaggagtgtaatcaactggtgggttcatcatacccactgcccagaaaagctgatttactgagacagtgttattgaaataggcaaagagtttcataagcacagaaccagctaaatagaagactggagttttactattactcaacttagcctccctgaaaatttggaagctggtgttttttaaagggtaatttggcagtcagggggccagggaataggaaatgctgactggttgggtcaaggatgaaatcatagagagtcagagcttgtgttcttgtgctgagtgaattcctggttgggggccgcaagaccagatgagccagtttgcccatgtgagtggtgccagctggtccatcagaatgaagggtctgaaaaatacctagaaccccaatattaggttttacaatagtaatgttgaaagcagttagttagcttggacacaaagcaagggaagggtccccggagagatcccggctcacagggtcagtgccttacccccacataacataaaaagcagcctgggaaaaaattcaagctaccagcacccataagagaactagcatagggtgttgtgcctggagacatgcccacggctgcacagatggaaaaacctctggcccatttggataaaagcttgcacaaaacttcagctcactcagacaaaagaacaaggcctggcatagaaatgcctttgtcctttgtatagtcagtgggctcccaggatgaagttgcttctacttttgtgggcatgggcatagtgggctccggtgagttccagtgggcactctactttcctttttggacctgtaagtccagcctctatgaatcatcacttcagcccctgataggtcttgggccaagctaagcagcatctaagaatcatttcagctcctgattggtcctgggccaaggctccttgccaagctgagttctccaagacagctgtcggactaagcacattgcttccccttcccagtccataaagaccccagcctcacaggggacacccgttctggcccccacgctctgctggcagagagctttcttctttcgcttattaaacttttgctgtaaccccacctttgtgtccacgctccttaatcatcttggaggtaggacaaagaactccgggggttatatcagacaactacagagtgttatatcttggtgcattgctgagactacaacagtgttttgtataggagcaactggagaggttaggaatcttgtggcctctgtctacataatttctgagccataatttctaatcttgtggctaatttgttagttttacagaggagatctgattcccaagcagggaggtggtttgtttcaggaagggactattatctttgtttcaaagttaagcagcaaaaattcctctcatagttagcttggcctgtgcccaggaatgagcaagggcagcttggaggttagaagcaaaatggaatcagttaggtcagatttgtcataatttttataaaggcagtttcagtaacacaagaagtaaagtgagtcctactactgtttattttaatcctagaatgtcagagccagaagagaccctacaggacaagtctcttgtgatttctgaataatgatcctcagactcatgctgtgataaagttttcacccctactctacaaaatgaggaccatatggaaaatataatcaggttttttataatttcataaaataaagtagattccactccattcttctacaagtatgacctccctataatgttgatactaaaaatttttctatgaaaagatgctaatagaggatagttgctttaatgctcttacttggacattaaaattaaaaattagaaacctcggccgggcctggtgcctgacatccataatcccagcacttgggaggccgaggcagatggattacttgaggtcaggagtttgagaccaggctggccaacgtggtaaaaccctgtctctactaaaaatacaaaatagctgggcacggtggctcatgcctgtaattccagcactttgggaggctgaggtgggtggatcacctgaggtcaagagttcgagaccagcctagccaacaccgtgaaaccccgtctctactaaaaatacaaaaattagccgggtgtggtcggggggcgcctgtaatcccagctactggggaggctgaggcaggataattgcttgaacccaggaggcggaggttgcagtgagtggagatcatgccactgcactccagcctgggtgacagagtgagactccatttcaaaaaaaaaaaaaaaaaagattagctgggtgtagtagcacacacttgtagtcccacctacttgagaagctgaggtaggagaattgcttgagcttgggagttggaggttgcagtgagccaagatcctgccattgcattccagcctgggctacgcagtgagactctgtctcaaaaaaaaaaaaaaaagaaagaaatctcaggtttaattattttttacattttatcacctgtgaaatacaaaagtctggcaactactgaatagtcaaatccctccttctatagtagaaacagctaaggctcagtggtagagaaataagtggtccaagataaaaccccagattggtcagacactactgacggtggctatgtgtaggacattccttcaactgtcacttttctgattttgccttttctttaagcatgttctactccacctcagcaccctccaggcaaaccagatcctgtccagagcacctttttttaatcatctagatcctagcttattctcccaaagcacccccaaattattggtatctgccactatttctccatcccatcactactttctccacatcaataccagaccccacccattgcctacttctgagttttctcttttacttcaaaaattgttctttggaggaattacttggatgctgatactgtttcaaagcaataattatggattttactatacatttaattacctattgtaatgtttgtggatgtctctgcttctccacctagattatgaacacctaaacaacaatagctgtgttttgtcttccttctactacctagtacactcccactgtcttaggtactcaaatatatgtagactaatgaataaatggacacagtctttgcagagcgagtgctttaatatttcgataaatataaagatttctttattgtggtcctcagtttacaaataacagacaggaaccaggggactgggtccagatgggagtaaggaggaagccaagaaaaccatttattcctggggctctggtcagttttagttgtaaatgggaagggaagaaaataacatgaagtggaggcagtaggaagaagaaatgaagaatccctgagtgaggacaggagtcttggaatgactccacggtgcacccgcaccctgtttcatctcaggcggcatcctgtcagccagtagaagagtggccggcctgaacagtgcaacctccattctaccctgcggagaaaaaagacatggttcttgcctcacactcagtaactcttccacacacatgacccagttcttggtgagtctcgcatatggagcaacgcccagaatccccgtcattgctagctagccctctggtctgtcctccactgtcccctctgacgaatcctgtaaaactctctcatctctggtgtttgcctgcttccctggatcaacgtttccacattttaaaatcctcatatctccctgaaggggtgagcactgttttacagggctgagagttacttattaaaaaaaaaaaaaaagtcccaggtacaaccattgattctccctccagaaaggatcagcataatcatcgctgtcaattcttttctgtggtgttttgagtatgcaggggatttgactccttccacagttgcctgtagaggcagccatttgtgttacttatatatctagtttgaagctcagaaaaggtgactatctgaatgtccaccgttggtgagctcacagctatgtgggtgtctgcccagctgatgaatgccacatttttttgttgtcgttttttgtttctttttttgagacggattctttctctgtcacccaggctggagtgcagtggcgcgatctcagctcactgcaacctctggctcccgggttcaagcgattctcctgcctcagcctcccatgcagcttgccttaaggagcatggacagaaagcaagggaaaggtccccagagagatcccggcccacagggtcagtgcctcatccccacataacacaaaaagcagcctgggacaggcacccaccacaacgcctggctaatttttgtattttttagtagagacaaagtttcaccatattggccaggctggtctcgaactcctgactttgtgacccacccacctcagcctcccaaagggctgggattacaggagtgagccactgcgcccagccgccacatttttttttttttttaaacagagtctcattctgccgcccaggctggagtgcagtggcgcgatctcggctcactgcagcctccacctcccaggttcaagcgattcttctgcctcagcctcctgagtagctgggactacaggcaggcgccaccatgaccagctaattttttgtatttttaacagagacggggcttcaccatgttgaccaggctggtctcgaactcctgacctcaagtgatccacctgcctcagcctcccaaggtgctgggattacaggcgtgagccaccatgcccggtccacatttttaaataaaaaaatattgtcaattatggccacagggcccgagcggcagccataattgtattgcttaactcctcccatccctacagttgattggaccaagggggcacacatggtccaagtggaaccaatcagattctctatcccaggaacttggactgggactgagcctagccagtccctatggttgcttaggactttagcttattaactttgcagcaccctttgtcctttagactgtggagcagagaaagtctgcggagagagaagtgaagcaaatgcaccaagagaagctgaaacctgccatggacagtgtgctgacaatttccagccctggttccatgctcttcctgaggcccagctgcagcccttgagtgggctcagtgagacatctgggcctctcagaataaatttcccccagctagctcaagttgttttctgttactgcaaccagaagagttttgtttaatacaatatcatagaagaaccagatctcagagttccaagcccgtccgctatcccacatctttctagacactgcaagggcgtgcccgtgagtccttgcctactgcccttttctctgtcacgtcctccttcgtggggctctgcccgctgagtcccaccgtgtcctcctcaccagttgttcatcccccgtgctccggacacaatcctttttgcgcagtggatgcctgcaagaaggttgggattcagcagatctgaaagggaggaagagaaaacctgtgagggcacagaagacagccccaaagatggaggcagacaccagccctccctggacagccctatgccacctagaggcttccagttgaggcaaaggctgtctcccagggggcccatttagacatccctacaatggctgctagaggttcgaggtgaaagggggtgtgggcagaaggggcaagaggcctgagatttgggcctgttcactactattcttcctaaccagggtagatagtggttcactcaaagtttgtgggaggtttccagggagaggaaatgccaaaacaccacagaggtatgtcccgcctagtgagcgggggtcttcaggcgaggagccgagggacatcggtcagtgtgcgaaggcagaggtgaggggcagagtcatgggccctgtcgagcctcctggatcagctctgaggtagggagtttgcacttggtctttggtcagatcattagctaaagagggtactccggaatggttaagagcctgtgaggccattagtctggcattcaatgctggttctctttttgagcctcagtttgctgttttgtaaagtagggatcataaatggtttctactgcatgaaagttggatgaaataagccaagtatgtaaagcacttagtgtataatattctctcaataaacattggctgctgcaactgttctactactaccagctgtatacggagccttcctggatcctactcagggactctatagaatctcctaactggatgggcattagggacactactccagccctctgctcagtaaagggattccctgattttttgaaccatatttctggggccattcccaggctgtgggtgggaagagaagttctgtgagcagagcctggttgctgctctcatctctcccaccctggggccctggccagaccttgacagtctacgtggcaaaggttttccgagtaactcttataatcgttgcaccagtagtggctgttgatctggaagaggccatagtcaaagcttccgtctgcattttcatttatctttgatatgttgaacttgctttccacaaaagccaggcacagcccttagagtagggagaagaaggtcaggatttagaggggaccaagctgagtgagaagggagatggaggagaaagggaggcaaggtttcagacaaaaggaacaaggcctgggaggcaagataggactagagggcttgaaatctccattgacttgccctcttatcctgtggtccatccacccactcataagtacaattactcatctgtccatctattcatgtgttttgcacttactgagcacctactgtgtgccaggaactgtgcaaagcctagtgagggacatttcagttgggtcaaacacagatgctgccttcaaggggcctgtattacaagcttaaaaatatgtacctaagcttgtaatacaggccttgtaataagcttgtatgtacaagcttaaaaatatgtacaagcttaaaaatatgtatgccgggcgcggtggcttatgcctgtaatcccagcactttgggaggctgaggcgggcggatcacgaggtcaggagatcgagaccatcctggctaacacggtgaaaccctgtctctactaaaaatacaaaaattagctgggcatggtggtgggtgcctgtagttccagctactggggaggctgaggcaggagaatggtgtgaacccaggaggcagagcttgcagtgagccaagatcgcgccactacactccagcctgggtgacagagcgagactctgtctaaaaaaaaaaaaaaaaggtacctaaaaaacccacaaagcaagattaaaggacaaaagtgttgcaagacaggtgcacacaactcctgggcaaaagggagatatcccttccatgcaggaggagaaagcctttgtactagctgtcccctctgcctagagtgttcttcccccagacatttgggtgaccaggtccttcatttaattcagtgctgcttaatgtcatctcctcagagaggccttccctgacttccccatctaaagaattcaccattgctccccctgctttattcttcttcatagcattggtcaccaccaggcagtacgttatgagtgtgtttgttgctgctctcttcccctaggatgtgaacattataagggaagggaatttgtttatctctacagccccagtgcctaaaacagttgttggtacataataagtgctcagacaataacttgagtgaatacagcgtgttgggaaaggcttttttgaagggggctgctttttgaacttggctttgaaagatgaacaggagagaaagaagctggccatataggacatgactagcagaggagaaatggctggggaggggcggatggtactcacagtcactcagggagtaaccctcaaacccatccaagtcctccagctgcagcacctgggccaagtcacagcgactgatgaggctggcctgatttagggcaagaaagctgctgaccaaatagatgagtagcgcctttgtcatccttggaggggaggaggtgcagctgagggctgatggttcttagggtcttgcagactttctgctgatcttctctgagagcctggggaatctggagagggcagccaggtttccttactcactcactgctccaacctggctgtttccaatctcttttctcttgtttattattttatagatttttatttatcatggaaaattaaacctttaaaaaaggaaagagaatagtatcatgaacctccatatacccacttctgagcttcaacattcaaaaaccaaggccaatctttctttgttgttgtttgttttttatttttttattttttagagatgggggtctcactctgttgaccaggctggtcttgaactcctggcctcaagtgatcctcccatctcagcctcccaaagtgctgggattacaggtgtgagccaccacacctggccaatctcatttcatccataggtcctcttatatgggcacccagctatgggtagtatttgggtattgggatggggagtgaggttggcaaaggagattactgaagactatcttcaccagcatatgtgtgtgtgtatctgagcatgtgcttttagaaagagggccaggacactgggtgctaatctccccacaaccccactcccccagacacatgacacatgatttttcccaagggcataccctgcctggtacaattcttggtgggctggctgtagacgtaaccttcactttcacattgtgtatgtgtgtgtgcgcgtgtgtgtgtgttgaatagcaagggccctagattcacactgcctgctttcaaatcctggggtgctatgtgactttgggcaacatactcaacctttctgggcctcatttgtaaaatgaagatatgctaatacctacctaaaagggttgttttgatgattaaatgaaataatgcccagatcttggttcacattccacacaaaagggaaccaggactctaggaaatatggctgattcccaggctggagcaggaaagggttatgagatgtctggattatcttgctgtacaagaaatttaaaaagtgctcgaaatatgtattggggcatgtcaaatggacacaagagctagctcaaaggggcaccgactggccagatctgaaacgatgttttttggtaacagcattattgagatataattcatgtatcatacaattaattcagttaaagtgtacaattcagtggttttcagtatgtttgcagagttgtacaactactacctcacttgattttagaatattttcatcaatccaaaacaaaaccctgcacccatttagcagtcactgcccatcccccacctcccaacccctggcaaccactaatctactttctgtctctatggatttgcctcttctggacatttcatacacacggagttacagaaaatatggcattttgtatctggcttctttcacttagcataatgttttgaagtttcattcaggttggagcatgtaatgatacttcattcctttctatggttgaataatatttcattgtatgaatacaccatacttcgtctatccattcattagttgatggacatttgggttgtttctatttttggctatcatgaataatcctactatgaacattaacatactagtttttgtgtggatatatgtttttatttctttggagtagagttgctgggtcatggggtaaccctaggcttaagcttatgaggcctaccagatttccaaagtggctgcaccattttgcattcccatcagcagtgtatgaaggttccaatttctctacatcctcaccaacacttgttattatctgtcttcttgacaaaaggtatcctagtgggtatgaactggtatcaccctgttgttttaatttgcgtttcccagatggctacggatgttgatcatctttttatgtgcttattggccactgtatatctttgggaaaatgtctattcagaacctttggccagtttcaaattgagttgtctttttattactgagtgggaagagttctttatatattctgtatactagaccagcatcagatatatggcagatatttttttcccattctgtgggttgcctttcactttcttggtggtgttctttgaagccccaaagtttttaattttgatgatgtgcaagttatctatttgtccttttgttgggtgtgcttttggtgtcatatctaagaaaccattgcataatggtttccaacccaatctgggacaattagaccatcagaataaatgacagtaacagattatacattaaatgcaataggaatccatgagcccataataataataaattgacaaaaagatacattgtgtggagctgaagcagagacctcttcctgacaataaaaggccaaccgataagtgtggaggaagtcatggagttgaaaaataatcaccattttgcaactatcatagattggtttgagaacaaatcatcattgcatgctaaatctgaggtggtgggaagaatgctgaagaactggatatatcatgatcttatagggtctccccacagattgcttattagttgcacagaaagaaaaaacaaaacagtatacagtggataaccagacagtattttgaccttgcaatcaaaattaacatctccaaagacggacagagggacattgtgtgcctccagatgtgattcccaaggaggacacatcgcttatgcaatattccgtccagggatgcataggctatgtctaatcctgaggaaacatcaaagccaaactcactgaaaatctgtaagataactggcctgtattcttcaaaatggccaatgccatgaaaactgaaagactggccaggcatggtggctcatgcctgtaatccgagcactttgggaggctgaggtgagagaattgcttaggccaggagtttgagaccaacctgggaaacagcaagacctcatctctacactaaaaagaaataatacttccaataaatctgaaaacctgggactatttctgtcactgagggaaggtgtgtttttccccttaacttaggtatatgctgctgagggggcagaagcctgagttcttccacccgccgccttcaagtgtcaggcggcttctgcttggacaagatggctaccctggtgggcttgtttcttctctggtcttgttataggaggcagaaagaaactacttaggtagacagttagggtaaagtgaatccccagcagaaaactttccttttaacgcaaagcagctcaaagatagctccctttctaacctcacgcagttcaaggaaatcacttttcttctaacaacaaccagcctgaaagagcaaagggtaaaaacagataagagctcaggcacagaaggatgggggaagtctcctgggtaatcaccaaacttcacacttatacaatgggccccagtaaaacagtgggccttaataactacattcctttctctttaggcgcgctaagatagggaagctaaaagcagaatcgatgggtatgcctacagctgcaagatgtgtgggaatagacacagaaactctcgctcccagataagcaagacaaagagacacagactaaaagttgatgtggtcgggaatggggtgagagcctattaaaaactctgctctatacagatagcacacctggtcccaactgaaccatcgggctctaggaggataagacatcccctcctcatgaatgcccctctctagcccatttataaaaccctgacgtttttactaccacctggcaacctgcctgggacctctgtctgtgacagagagctgttctttccttttgcctattaaactcctgctccaaactcactctgtgtgcgtgtgtgtctgcgacctcgatctccttaaacgtgagaccacgaaccttggtatttacttcagacaatgaggctgcttctgtctcttgttctatctgagactcgttccacaccagcctgagcttcgggccattcttttgcttctcccatcattctacccccagagctgacagatttggcaaataaaatttacaagatgccctgttaaattagaatttcagacaaacaacctactccacactgactcaggagggtccctcagagatagatgtcactgagcctcgggaagcaggaagctccatccctgcccattaagccccctctcagggtcccctcaaggaagacagtggctccagaaggtatgttcccaccccttccacagcttacctctctcccatccctctctgaccctgggttccacctggcccagagatttctgggaggatctgtagaacaaggctgtctacagtaggagcctcttcttcctcaccacatacacttcagccctgcccaactaacagctctccatgttctaaagaaggcttctggaaccccagttctgtgacgtcatccatctcctggaaatacactggttttaaccaggcaaattggccaagcatcaggcagaagtagcagctgggcctgggaggacaggtgacatctgtgaggaaaatggccgggtgggatagggtggagagcactggctgtttccttcatttttgggaacagcaccacctttggggggactccttccctcatggggttttagtgggggctgccagtcctggggtcctgccccccaccaccccccataagcataggaatgcttgtgtgccagtcactatatttgtaaacggaagctggtggagctgctcagcttccaacaggaagcccatgtgtgcagggccagaggacatagcccatctaaggtgctaagcctccgtgaagagggagcggagtctggacgggattccagccccagggtccaccctttctgggacccaaacacacccttcccctcccttcaattctgagattcaataaatgtccccactcacagaacaagtttgagttgggtttctgtcacttgcagccaaaagagccagttgtagtcggcatggggtcaaccatctgtgatatggtgacctgacaccctgtcccctccctgtgaaggccacaacatcccaacatcattagtcaccgaggaagtctgggagaaatttctaccaactgtagcaaaaaagaggcaagggagaaaacatcttgttactgacggcccactcttccctctgaaacagggaggcaggatctgacagaaaaataggacaaggggcttctgagtgggcagtgctgccccgtgcccctccagacttctcttcccagcagggcagcagtgcatggcaccctgggatagaaggcctgcaggggcagaggggaggctgaacatgctgggggcaccactttatgagaaaccatttgtggccaaaaatctacatgggcttcagatgacctgaatgaactcgtctctgtagagtgagagtcctgggcaggaggaaaggtttccatagccaaggaccacatgcttggaaatttgatctctgaaacttaagatctgagagaggatggtctcccaaggaagtcacatgagcctcagtttaatcctgttggtttgcagaagtttccactccctctggaggctgggttgggacctcctgctgggctgcagaatatttagtctctttgataggctctgaagttatggtcattcaaagggggtccagagggaccctccacctccagccccctagctgtggcaaacatgggtagattcctacccattcaaacaactggaaaacccaagctgggacccatgagtcaagtcagctcagggcaagaggacagatggataccataggccatctgtctcaatatttgcaagttataaattaaactaacagactgttaaagtatgtcctaccctcatactctgacaaatattcctttaaaaggataaaattttaaaatgtgtatgaagctatgatttgtatttttttttttttagagatggagtctcactctggagtgatctcggctcactgcaacctctgcctcctgggttcaagcaattctgcctcagcctcccgagtagctgggactacaggtgcatgccaccatgcctggctaatttttttttgtattttagtagcgacagggtttcaccttgttgcccaggctggtcttgagctcctgagctcaggcaatctgcctgcctcggcctcccaaagtgctaggattacaggcgtgagccaccacgcccggccgattatgttatgttatgtatgttaaagtatgtcctatcctcatcctctgacaaatatgcctttaaaaggataaaattttaaaatatatatgaagctatgatttgtatatgacagaaagttagcaaaatgtcaaagatcatgaaatttcatgtttattgcgcatgtctgggtgctctgttgatgggctgacaatattgggatgagtaataaagatgtggaatttataaattactgaaactattccatgaaatgtatttttcttatctttcagcaaaatcggtaattatgttattattatcaagatttgaaaatacatgtaaggattaaaacaatcatattcaaagtacaaatatcttaatattttcatcaaaattatgtttatgtaaaaaatttaattttatcaggaatattttcccaaaagttagttttcttttcaactattgaaaagtatccattaaaccaaaaggcaacatacaaattagaattagtcaaatttttacgtcaaaatgattgaaataaatccattttattttgatttttgaaaacttgattaatttttattaattttaaattcataattctagcattcagtgaccaccaatgtaaagaacaggcatcatggtttgtctgagggctagacatagatacaaattttagagtaatgtgtaatgtgatttgtttaaccctttttctgtttgcccagagaatactcactggtggcacctgcagctgcagtgtttaccccaagataactttgccatgaaatatttaacacaaagggtaaatgcttgaggggatggataccccattctccatgatgtctttattatgtattgtatgcctgtatcaaaacatctcaggtgccccataaatatatacacttactatgtacccacaaaaactacaactaaaattttaaaaagtaatgaactattgccacacaaaacaacatggataaaactcaaaataattatactgagtgaaagaagcttgacaaaaaagagtacacactgtatgattccatttctagaaagcactagaaaatataaactaacctatgatgatagaaagcagatcagggcagggtacagtggctcacacctgtaatcccagcactttaggaggctgaggtgggcgaatcacttgaggtgaggagttcgagaccagcctggtcaacaaagtgaaaccctgtctctactaaaaatataaaaattagccaggcctgttggcacgcacctgtaatcccagctactcgggaggctgaggcacaaaaatcactcgaacccaggaggtggaggttgcagtgagccaagatcatgccactgcactccagcctgggagacagagcaagactccatcttaaaaaaataaataaataaaataaaaacgaaagaaaagaaaaaaagagagcagatcagtagttgcttgggggtggggaggtagaaagagcaggaagcaggatcaccaagggcaacaaggaaactttttgtgggaacggatatcttcactatcttgattgtgataatgatttcaggtgtataccaagggtcagatgttaccaaattgtaatctctatatatgcacagtttattatatgtcaatacctcaatacatctgcctaaaatgtttaaaaattactgtaattatacaaaatatattttatgaaaaggaagttatgggtgggcatggttgagaaccacagcatcagatagattcagaagtgggggaaaagcatctcccacttccccttcttcaggccagcgtgctgtgcaatttatccagtggacactagaggacagcagcgactcaggtagaggaagtgggcgtttcagggcttgaatgcttagaattctctgctctgtgctccctatcctgggcggtgggcggtgggcgttaatacccccataatactcagttaccgctgggacttgggccctggtctgtggctcttgattccaccttgttggtcccccaacaccaggagagctctctgtgctcccagatttttttttttttttttttttgagatggagtttcgctcttgttccctaggctggagtgcattggcgcgatctcggctcaccgcaactttcgcccccgggttcaagcgattctcctgcctcagcctcctgagtagctgggattacaggcatgcaccaccacgcctggttaattttgtgtttttagtagagacggggtttctccatgtaggtcaggctggtctcgaactcccgacctcaggtgatccacccacctcggcctcccgaagtgctgggattacaggcgtgagccatggcgcctggcactcccatttctttttaaaaggatatcctgactccagtgagacagcagccatagttccctgtctgttatctgcagggctgatatggaggattgcagatgtcaccaaagagttgtggttctcaggctgggcacagtggctcacgcctgtaatcccaacacttggggagacccaggccggtggatcacatgaggtcaggagttcgagatcagcctggccaacatggcaaaacccatctctcctaagaatacaaaaaattagctgggcctggtggcacacgcctgtagtcccagctactcaggaggctgaggcaggagatttgcttgagcccaggaggtgaaggttgcagtgagctgagattgcaccgctgcactccagcctgggcaacaagagtgagacttggtttcaaaaaaaaaaaaaaaaaaagttgtggttctcaagggcctttggaaggcctcccagcttgcctgaaatccacgattataaagcccgtcaaagttgcatcatcagacgctgcaacatcacaggttagcatgtccctgagaaaacgacacactgaaaggtaatttttataagaaatagggaaaagagagaaggttcaattgaggggtaggaaaatatgatggtggagcccccttacggtgctgcaatagaagcttccccccaaaaagcaatagtggtctgggcgctgtggctcagtcctgtaatccagcactttgggaggctgaggcgggtggatcacttgagctcaggagttcgagaccagcctgaccaacatggcaaaaccccgtccctactgaaaatacaaaaattagctgggtgtggtggtgtgtgcctgtaatcccagctactcgggaggctgaggcaggagaatcacttaaacctgggaggcagaggttgcagtgggcccagatcatgccactgcactccagcctgggtgacagatagaaactccatctcaaagaaaaaaaaaaaaagaaagaaagaaaaagaaaaaaaagcaaattgtgagcatacattgagccatcccagtgtgtgaggcatgatgcggaacactctatgcaggcagtcatctcatcttcacagcactcttactaaataaactgcagagaggtggcggggtgcagtggctcacgcctgtagtcccagcactttgggaggccgaggcgagtggatcatgaggtcaggagatcgagaccatcctggctaacacggtgaaaccccgtctctactaaaaatacaaaaaattagccgggcgtggtagcgggcgcctgtagtcccagctactcctgaggctgaggcaggagaatggcgtgaacccaggagacggagcttgcagtgagccaagatcacgccactgcactccagcctgggagacagagcgagactcgtctcaaaaacaaaacaaaacaaaataaaccacagagaggttaaaaaatgcctaaaggtccaggcgcagctcacatctgtaatcccaacactttgggaggccaaggtgggtggatcacttgagcccaggaattcaagaccagcctgcgcaacatggcgaggccccatctctacaaaaaattacaaaaattagccaggtgtggtggcctgtagtcgcagctactcctgaggttgagggaagaggatcccttgagcctgggagtttgaggctgcagtgagctatgattgcactacagcctgggtgtgagagtaacacagtctcaaaaaaaaaaaaaaaagaaaagaaaaagaaaagcagttgtggacacacattgagccctcccagtgggtgaggcacaatgccaaacactgtatgaaggaaataatctcatcttcacagcattcttactgaataagctgcagagaagttaagaaacgcccaaagtcacagagctgataggaggcagtgcaggatttgaatccagatttgacactaacgtatggatctagctactgctctgcagtacccacttaaagggaagtgtttttctttcttggttatttagttcatgtgttaaactggttggtgttggtagcagatggtgagtattatagttcagccttctggagaaagcttgtcaggcttcaagagaatgttaagcatctatgatggtcctagagggaggttcccctctccaccccttcactgctttacatggagcacttatagtgtgtgaggttctgtgttaaggatgatactttcataatgacggtatctgaaaggcaggtgggcagaggccagcaacaaggaattgaagggtcagtgatgtagcaatccagtgacattgttcatttgcacacacatgggtctgtcacatgcagcccaactcacctggagtcctgagaaggtaaccagaccaggatggaggcccagggaactcaccagaagttctcaagcatcagaacacggtgaaagcatcctggtaggcagataacacatgcccacggtttgtgagagaaagtcctccagcagtttctctccttccccttggctttgacctggcatacctgggatcaggcagttgattctccaggccaggtgcctcagggaggtgacccttcctgttctgggttctgcagaagccaacagctctgggcttgtgcccatcaagcactcttctgcccattttactctctcgtggatgcatggtggtgttgatacaggccctgagttaaaggctccatggccgcccatgacaggaggacaaagcaaaagaaagccagagttaaacaggccccttgggtcccctccttcacttcatagatgggaaaaccaaggtctgggcagggaaagggattcagccaaggccacagcgcactgatggccacgccagggttaggattcccagcacagtctgtttctctcatactccgcagccttctctaataatagattttgggttgggttcttctttatcaagcgctggtcacacattatctctatctttcttaaaacaattgttctttaatatcattatatattcagtcagtgttcaaattttcaactgttttatgtcaaaaagccttttctaaagttgattaaatcaggattgaaataagatgcacacattatgattagtcgatgtcttttaaatcttttaatccatggattcctctttcctctttctctttttccttttattcttgaataagccacatcatgcctaaacacctgaaatccttctcattaaagagaaaaaaaaacaccacaggaaacgttactacatatataaagatgaagataggaattgcttgtgagtgaagcaatgaagtctgagcacaatgtggaaactggaaatcagaggttgcattttaaaaatctccactctcttctttagatagattggtgattattttacctatttcattttaactatcttaaacacaacgtaaggaacctaaagagaaaacttgtcagcaattgatctgtcctttcaatgaacagtgaatgccacggcgtatgtctacctgggtacaaatctcctttgctaataagcaaacagtgaacctctaaatcaatgtaaactttcatcatgtttcacttcagttgattccacacgttgaggctaagcacagctgagcaaatcagctgtaaaatcctaaagtaagaagatatcattttaaagataaaaattgtgatatttaggccaggcacggtggctcatgcctgtaatcccagcacttgggaggcagagacgggcggatcacgaggtcaggagatcaagaccatcctggctaacatggtgaaaccccatcgtctctactagaaatacaaaaaaaaaaaaaaaaaattagccgggcgtagtggcgggcacctgtagtcccagctactagggaggctgagccaggagaatggcgtgaacccgggaggcggagtttgcagtgagccgagatcatgccactgcactccagcctgggtgacagagcaagactccatctcaaaaaaaaaaaaaattgtgatatttagacaaagcattcttttactgatttcatttaaaaaaccatctgtgctcttggctgaacgttgtgtgaatttgatcctgtcatcacaatgctagctgattattttacacactagttgatgcagtttcttcatagtgtcactagtctttatattttggtgtatttttgcagtggctggtactggtttttcctttccgtatttggtgcttcattcaggagctcctgcaaggcaggcctggtggtgatgaaatcccttagcatttgcttgtctggaaaggattttatttctcctctgcttctgaagcttagttgggatggatatgaaaatctgggtggaaaattcttttctttaagaatttctttctttttttttttttttttgaggtggagtctcactctgtcacccaggctggagtgcagtggcgccatgttggctcactgcaacgtctgtctcctgggttcaagcaattctcatgtttcagcctccaagtagctgggactacaggcacaagtcaccatgcctggctagtttttgtatttttagtagagacggggtttcaccatgttgaccaggctggtcttgaactcctgacctcaggtgaccccaaagtgctgggattacaggtgtgagccaccatacctggcctctttaagaatgttgaatattggcccccactctcttctggcttgtagagtttctgctgagagatctgctgtcagtgtgatggacttccctttgtaggtgacctgacctttctctctggctgcccttaacatttttccttcatttcaacgttggagaatctgacgattatgtgtcttggggttgctcttctcagggagtatctttgtagtgttctctgtatttcctgaatttgaacgttggcctgtctttctaggttggggaagttctcctggataatatcctgaagtgtgttttccaacttggttgcattctccttgtcactttcaggtacaccaatcaattgtacatttggtcttttcacatagtcccatacttcttggaagttttgttcattccttttcactctttttttctctaatcttttctgcatgccttatttcagcaagatggtcttcaatctctgatatcctttcttccacttgatcactttggctattgatacttgtgtatgcttcacgaagttctcgtgctatgttttatgttcctttctaaactggctattctagttggcagttcctgtaaccgtttatcaaggttcttagcttccttgcattgggttagaacatgctcttttagctcagaggagtttgttattacccaccttctgaagcctacttctgtcaatttgtcaatctcattctccatccagttttgtgcccttgctggagcggtgttgcgatcatttggaggagaagaggcattctggtttttggaattttcagcgtttttgcattggtttttcctcatctttgtggatttatgatctttgaggctgatgacctttggatggggttttgttggggggttgtttttgttgatgttgttgttgttgccgctttctctttgttagtttttcttctaacagttagatccctcttctgcaggtctgctgcagtttgctggatgtccactccagaccctgttcacccgggtatcaccagtggaggctgcagaacagcaaagattgctgcctgttccttcctctggaagcttcatcccagaggggcaccggcctgataccagccggagcgctcctgtatgaggtgtctgtcaacccctgttgggaggtctctcccagtctggaggcacgggggtcagggactcgctcgaagaggcagtctgtcccttagcagagttggtgtgctgtgctgggagaatcctccttgtgaggatcagccactctctttagagccgtcaggcaggaaagattcagtccactgaagctgtgactgcagccgccccttcccccaggtactctgtcccagggagatgagagttttatctgtaagcccctgactggagctgccacgtttcctgcagagatgccctgcctagtgaggaggaatctagagaagcagtctggccacagccgctttgctgcactgtggtgaattccacccagtccaaacctcccagtctcagcactgtcaggtgaaaactgcctactgaagccttggttatggcgaccgcccctcccccaaccaagttccattgtcccaggtcgacttctgactgctgtgctggcagtgagaatttcaagccagtggttctcatctagttgggctccgtgggagtgggacccgctgagcaacaccacttggctccctggcttcagccccctttccaggggatatgtaatattctaaagcctttattgttatttttacaatgctcacagcatcttcactaagtatagactccatcttaagaagccacttcctttgctcttccataggaagcaactccacatctattcaagttttatcatgagattataacaattcagtcacatcttcaggctccacttgtaattctagttctcttactatttctgccacatctccagttacttcttccactgaagtcttgaacctctcaaggtcatccatgatggttgaaatcaatttcttccaaattcctagtaatgttgatattgacctcctatgaatcacatcttcttaatggcatttagaatggtaaatcctttccagatgaaaatcttggaaatccttttcaggccgggcacggtggctcacgcctgtaatctcagcgctttgggaggctgaggcaggcggatcacgacgtcaggagatcgagaccatcctggctgacatggtgaacccccgtctctactaaaaatacaaaaaaaaaaaaaaattagccagaggtggtggcgggtgtctgtggtcccagctacttgggaggctgaggcaagagaatggcatgaacccgggaggtggaggttgcagtgagctgagattgtgccactgcactccagcctgggagacagagcaagactgagtctcaaaaaaaaaaaaaaaaaaaaaagaaactccttttcaatttactttgcctagatccatcaaaacaatcactatctatggcagctctagccttatgaaatgtgtttcttaaattacaagacttgaaagtaaagttactccttgatccatgggctaaagaacggatgttgtgttagcaggcatgacaacaacaataatctccttgcacgtcaccatcagagctcttaggtgactagatgtacagtccatgaggagtagtattctgaaagttatgttttttctgaatagatctcaacagtgggcttaaaatactcagtaatccatgctgtaaatggatgtgctgttactctggctttgtcgtttcatttatagagcacaggtagagtagatttagcatcattcttaagggccctagaatttttggagtggtaaatgaacactggctttaactgaaagtcaccagctacattagcccctaacaagagagtcagcctgtcttttgaagctttgaaggcagacattgacttctctatagctataaaagtcctagacagcaccatcttcccatagaaggctgttttgtctacactgaaaatctattgttgctctcgaatggccctggccaggaagatgagttgcgtgtgtcacttcaactggccatagtggtgggaatggaggcagtggggcctgtgtggccgcctgggtttgtgaaatggctgctggcatttctgaattcagtggggctgattgcaaaggagacccaagaaacagtgccaagttagatgctgattactcactttgagtcctttattgtggagtctgttcattactaacacacacacagacacacacgcacacacataacatatccatacacatatcacattttaaaattctgtttattttttcttccaacttttattttaggttcagggagtgcatgggcaggtttgtcacatggatacattgtgtggggtttggtgtaccaatgactgtcatccatgtagtgagcatagtacctgataggtagtttctttttaccttctttctttttttttttttttgagatggagtctcgccccatccctcaggctggagtgcaatggcgccatcttggctcactgcaacctctgcctcccaggttcaagagattctcctgcctcaacctcctgactagctgggattacaggcccctgccgccatggccagctaatttttgtatttttagtagagatggagtttcatcatgctggctaggctggtctcaaactcctgacttcagatgatccacccacctgggcctcccaaagtgctgggattacaggcatgagccacggtgcccggcccctgataggtagtttcttgatcctcaccctcttcctactctccacccttaagtgagccccagtgtctgttgttctcttctttgtgtccatgggtactctatgtttagcccccatttcttagtgagaacatgcaatatttagttttctgttcctgttttaatttgctaaggatgatggcctctagctgcatccatgttgctgcaaaggacatgaatgatttcattccttttttatggctgcacaatattccatagtgtatatgtaccacattttctttatccaggccaccactgttgggcatctaggttgattccatggctttgctattgtgaaaagtgctgtgatgaacacgtgcacacatgtatttatggtagaacaaattatattcctttgggtatacacccagtaatgggattgctgggttgaatggtagctctgttttaagttctttgagaaatttccaaactgctttttaaaaaataatacatttaaaaaatccattcagcttggttggttcaagttggttccacagcttggctactgtgaataatgctgtcatgaacatgggagtgcaggtatccctttgacattgatttccgtttctttggatatatacttagaagcaggattactggattatgtgatagttcttttttcagttttttgaggaatgtccatgctgttttcgataatggctgcactaatttacattcccaccaacaaagtaaagagttcccttttctccacattcttgccaacacttatctttcatctttttggtaaaagtcattctaattggtgtgcgattatatctcgttgtggtttaatttgcatttccctaatgattagttatgctaagcatttttttcacgtacctattggccattcgtatgccttctttggagaaatgtctgtttaggtcatttgcccattttttaatcaagttgttttcttgctgttgaattgtttgagttccttttacattctggatattaactccttactagacgtatggtttgcaaacattttctcccattcggtggattgtctcctcactttgttaattgtttcctttgctgtgcagaagatttttagtttagatgtcatcccatttgtctgtatttccttttgttgcctgtacttttgaggtattttgtcaatattttatctcagtttatcagttgtctttgtcttttgactttgtggtatttttttggtcatgcaacattaaaagttttattttttattttttgagacagagtctcactctatcacccaggctggagtgcagtggcatgatcttggctcattgcagccccgacctcttgggctcaaacaatccttccacctcagcctccctagtagctgggactataggcatgcaccattacgcttggctagttgttttcttttttttttttttttgtagaaacagggtcttactatgttgtccaggctggtaaatttttttcatgtggccaaatttgtcaatcttttcttctgttcctctagatttagatcttagaaagcctttctcttcaccaaggttaaataaaaagttactaagttttcttccattagttgcatggttttatctttagatattcagaccctttagatccttaatccatttgtgtattcttgagcatggtgtgagatacgagttatctatatggttacttagttgtctcagctcatttaattaaaaagcccacctttatcccaatgatctgaatgccacctttgtcatacactaagtgttgcatgcccttgggtctaattctgaactttttgttctattccacttgtttattgtctatttgtgtactagtaacacactgttttgatttaggctttatagtaagcttcaatgggtggtagtaagagccctgttgtttaattaactatagcagagttgagggtaatgcttagctttgttataattctagatctaaatagctgtatcttgtagattgttactattcaattatagattactgattacttgagccaaaggaggttagggccaataccaaatacaaattttaaagaaaagtggctaatttatttagttcatctggcattcctagagaaacagatctggcacaatataaacagtctatgtacattcaatccccagtttatgaaactctctcagaggattggtggaattccatattctctaacaagattcattcctggggcacatgaatctgattctgatttgacttatacattcgtcgagaaccactattatgtataagcacccagctgaatgctgcaagatttcctaatggaaaatactggcattttcactcatttgcaaatattaattgaacattgtatgccaggcattgtgctaggttctggagctataataatgaataatatagttatgacccttgtctaccctccacagtttagcaggaaacagaggcaattaaacaagtaataataatagtgtgataagtactagaagagaggaaatatagtgtgctggggcaacacacagctggggcaccttaaggtaatttaggagagtcagaaaaagcttcttagaagaagcaatatttaagctgagacatgaaggaggacaaggagtgaaccaaggtgtggtagttttccaggcagaggaaaacagtgtgtgcaaaggccctaaggcaagacatagctttttactttcaaggaactaaaatcaatttctgtgtggttagagtataagtgagtggggaatgatggaagatagggcatggtaggggttttccacctgcactggttttgctccccaggaaacatttggcaatttctggagacatttcttgttgtcttaactaggggttgagacagtgctattggtagtagacagagatcaaggatagttcttctaaatatcctacagtagacaggacaacatctgccttgcccttgcccccctcacccccgcccccacacacaaagaattatgtggtctaaaatatctggtcctggcgaaagcaaaggtcctttcattacaattcatataatattttaagaagagagtttggatttcattcaagggcaaggaggagctatttgctggctttaagtagcaaaagcaaatgttttagaaagattactcagtacagagaattgactagagtttcttcattcaaatatttatgtgccatgcattgtgtaggagctggggatacagtggtgaacatttaatcactgacccattccagtggaagaggtagaaaataaaaataatatggaaattaacgatgaacaacaaggctgttttcccatattcagtatcccaaatgtagatgaaatctgggtctgaaaataaaacttcagtattaatttttagagaaaagccctagacaaattttataaaacatcatctatggggtatttgttgtttagtttggatctcatttctcctaaatgtaaatatttaaaaaaaaatcgccacaacacaaataaaatcttgttcttcattattgttcttcattttctgtgtatgtatgtgtgtgtgtttctggcttacttttccacattatgtttaaaatgcttaatattataggattactgaaatgattacttctttggctgacagctttaatagtgacagcaacaattttgggaaccatgatcatttgacaccccccagtatagtacagaacttgtctcttggcaaggatgacatttaattttttcttacataggtttccttgggggaaaataaaaacctttgctttttgtatctctgtgactcttcttaaaattagctattttctagaatgagctcatttcgatatattagcttcttaatctaagcagtaaatcagtgacaacttgtttaatgtgttgggaacttctagttgcataaaaaccttttttaaagaactttaggtcagcaaaatgactgaaaggtacaccttcattataactttcttgcttcgaagccacaatcaatgatggatggattttccagaatagcactaaacaaaaatccttcctgccacactagagaggcagcatcgcgtagtggttaaaagtatagacttggaggctgcctgcctcagtttaaatcttgactcagtcatgtactagtttatggtctcaagcaagttatttaatctcagagcctctgtttcctcatttgtaaaatggggataacaatagtattcaccttataggggagaatactgactctgaatcctagctttgacatttattaacagtatgacgttgaaaaaattaatcactgaagccactgtttcttcccctgtaaaatgagataataatgtacctcatagggttaaggtaaaaatgaagaaatgatataacaaatataatgtaagtagcactaagccacaatacacattaattcttctgtagacagaagccaagttctccttgtcttgtgaattctgtgtgtattcccacagggtagcaacagattcaaaacctagagaaaccactcggatcactgcagcctccgcctcccaggttcaaacgattctcctgcctcagcctcctgagaagctgggactacaggcgcctgccactgcgcctggctaatttttgtatttttttggagacagggttttgccatgttggtcagactgctctcaaactcctgacctcagaagatccaccaaccttggcctctcaaactgctgggattacaagcatgagccaccgtgcccagccagaaatctaatttttgactaatacgagttgtagaaggagagaatagaggaaagggtggtgaggaaattatcataaataatacaaaagcattactcagaattaaagaatatcctcagggcttgctacgtaccaacagaataaatgaaaaaagacccaagaacaatggtgataaaaataagattctaggccgggagcggtggctcacgcctgtaatcacagcactttgggaggctgggggtgggggcggatcacgaggtcaggagatcgagaccatcctggccaacacggtgaaacccccgtctctactaaaaatacaaaaaaaattagccgggcgtggtggcgggcgcctgtagtcccagctacttaggaggctgaggcaggagaatggtgtgaacctgggaggcggagcttgcagtgagccaagatcgcgccactgcactccagcctgggtgacggagcaagactccgtctcaaaaaaaaaaaaaaaaaaaaaaaaattctaaaagcttctggagagaaaacaaggtatatataaaagattgggaataagaatagtaccagagtatttaatagcaatattggaagctcaagacaatggaacaatgccttcaaaattgagaaaaaataatttttaccctagaatgatatactgtgtcaaacaaataagcaagtatgaacatagaaaaaagatgcttttagaaacagtaagtctcaaaaaacttacgtcctatgcatttttttattaggaagctactggaggatatgttccaccaaaatgaagaatcaaatcgagaaacaatatgacatagatgaaacacagaagagaactgacaggaacttccaggagaacaaggtggaaagccctcagagtgtcctaggcccagactaagctcgacggagggctctaagacggatgactcatgaaaccccatctctactaaaaagacaaaaaaaaaaattagctgggcgtgatagtcccagctacttgggaggctgaggcaggagcatcgcttgaacccaggaggtggagtttgcagtgagccgagatcgcactactgcattccagcctggcgacaaagccggactccttgtcaaaaaaagaaaaaaaaaaaaaaagaaaaaagaaaaaaaagatggatgcctgccaggttaaaaagaaaaaacgtaactggtaatgtggaaaattgtattgagagacattttacaaaactacattagggttatgaaatgacttagccaatgatgtgaagaaaaataagcaaattttaaaacgaggcatttcataaacccctaggaaaaacaaagtcgttcaagaaggaaatgttacccttggctccagggagaactatatttgcatagtattaatactgaaaatactataatatggttcagccaaaaatcatgaaataattgtgttgggatggtggtaggaagaaggaaggtaaaagagctgtaatttccatcatctataataagaagcaatagttaatatgtaaaataataaaagttttagcagtatacaagtagaatttagaaatatcgaggtgaaaatcagagaaacttccttaagagttgaaagtggctgcctttggggagaagatgggtggggtagaggaagagaattgctggttttgagcattatttggttttctatgtgcttatgttattttgagaaaaatatgaatttcaaacccaaatgtataaaagatattatggacagtgtagtatagcaggaagagttttaagttaggaatgaaaattaaaaactgttgattacttataccctgatgttgggtaaaacatatcccttttggccaggcgcggtggctcatgcctgtaatcccagcactctgggaggccgaggcgggcagatcacctgtggtaaggggtttgagaccaccctggccgacatggcaaaaccccgtctctactaaaaatacaaaaattagtctgggatggggccaggcgctgtggctcacgcctgtaatcccagcatgttgggaggccgaggcggatggatcacgaggtcaggagatcgagaccatcctggctaacacggtggaaccccgtctctactaaaaaatacaaacaaaattagccggctgtggtggcaggctcctgtagtcccagctactcaggaggctaaggcaggagaatggcaggaacccgggaggcaaagcttgcagtgagccgagatcgtgccactgcactccagcctgggcaacaaagcgagactccgtctcaaaaaaaaaaaaaaaaattagtctggcatggtagcacgcacctgtagttccatctacagctactagggaagctgaggaacgagaatcatttgaacctgggaaacagaggttgcagtgaaccgagattgcaccactgcactccagcctgggcaatagagcaagactccgtctcaaaaccaaccaacccacttctttgggtctcaacttctttatttattcaccagaagattttatttctaagggtctttccaactctaaggttctgatcccaacataatatttttctaggaatagtaaagaaagagaaactttcctccacgctttcatggtgtacctttatgtatttttgttcactttggcaaaggtctccctatctttgcttccttaatgttaaaatggaactaccatgtccccaacatgggaatcccatcatacttgtgaggctagtcttcgcatagcctcctgcgcatttccagagttcctgggcagcttccgctggtgatagatgagtgggctgaaggtggctgtgtgagtggcagctctctgttggcatccacatctggatcaaaaagatttagatggttgcatcagataatcataaaactttaaaggaaaaatgactaaattccatttgttctatgatccagcaatactgctcctaagactatacctacgagaaataaaaacacgtgtccacccaaaaacgtgtacacaaatgttcttagaagaatgattcataatagccaaaagtggaaacaacctaaatgcccaccaactgatgactagataaaacacagtatacccactcaataactattactcagcaataaaaagaaataagataccgatacatgctagaacggggataacccttgaaaatgttatgctaagtcaaagaagctagtaacaaaacaaaacaaaacatatcttgtatgattctatttatatgaaatgtccagaataggaaaatccgtagagacagaaagtaaattagtggttacctagggctagaaatagagggttaagaggagaatgggcattggctgctaacaggcatgagtttcttttagggggatgaaaatggtctaaagctggattacggtgattgctgtacaaccctgtgagttatactaaaaatgctgaattgaatactttaaatgggtgaattacatggtatgtgaattatagctcaataaaactgttgaagatttttttgaaaaaaattcaatttgttcttgttatttagaaaatgtattcttactagtagaaattatagactatatttatgaataagatcatactttaaaaatggataccaaagtaaatattagaagttgttatttgatggccaatagctattgaaaagaaggaggaataggaaaaagtagtcctcatttaactccctaccagtaggagtgaatttagacttctttcattcaactggtacattaaattccttggtcactgaatagagttctggataactgcaggggggtggatatgggagatggcaggaacaaaagcctaaagtaatgtgtgacattttgagttgaggtgaagttcagtgatcgtatgtcatgtattatttctgctcttcccttcctcctcctactgtattcccctttatctggtatttgattttgtgggtaattactgtcttcacctctgaattaatagtcctcacatgggctgggtgcggtgtctcacgcctgtaatcccagcactttgggaggttgaggccagcagatcgtgaggtcaggagattgagaccatcctggctaacacagtgaaaccccatctctactaaaaatacaaaaaaaaaaaattagccaggcatggtggcgggcgcctgtagtcccagctactcgggaggctgaggcaggagaatggcatgaacctaggaggtggagcttgcagtgagccgagatcgcgccactgcactccagcctgggcgaaagagcgagactccgtttcaaaaaaaaaaaaaaaaaaacaaaaaaacaaaaaacacaaaaggtcctcacgtggaagtcaggttttacagatcaggaaataaaaggatgtatgacttaatataaatatgtcagaaaaacttcagtgccaatgaagcagggagttatttaaaaaggaaatatacatttgggggaggcacgtgggctgtctgaggtgatctgtctcatctttgtaccatggcagctgagggccaccagtctggagatggtggcagttttgcagaatccagcgtttcccacaatcactactccgtggttcacgctggcatttgaacgttgaagttgagcatctatttcgtggaaaacccaatcttggccgacagacactgactctgtagtgatgctggtacttcaaagagaagaggcttcaaggagatatctggaggcctatgaggtgcaaagcgaactgagaggaacaagagaatacagaacttaggtcacactgtcaacattgagagaaatagagaaaaaaatgcagtgtggtttaggagactgagttacagtatgatggcatcctgggcttattcagaaataatgcaactctgaatgttgattctatacagataagtaacacaggtgagctagagctatttgatactctagattgcagaacacaaacattgataagatagtaacgatttactctattagtcagaaagtcagggtgatattcaaaattgttacatggaagggatgacccaagcaccagcaatcagtatggatgcaagcctagtgaagaagaagggtcctaaaggcctcctgctatgcctcgggataaccttttaattattggattgtggggaggtacagcaatgaagtgcctgttggaaaggcgaggctgtggcgggcatgcagagagcttacaacggcggctctttaccaaccagtaagaacatatttcggtatttagcaaccaatatggctacacccgtatatatcagttgaaaatcagttctgaagaaagcagtatagagaggcttgtttgtttctttaaaaacaccaatgagaatagtaattcctttaagttcatggatggtatttttaaaaatctagtaggtgtattgttaagagaagcagactttaaaagctcggatggtttaaaagatcttaaacatgttaagcagtcgggcagaaagcaggccttcactcactgtctttgcacctgtactgcttatattgtttgcaaaagagcatcactaagaagcttaataaggattaatgacatacatgaccctggaccatggacagaggataaaaatcaagctttgatagcaataaacatagtctctttttatctctaaacagacagaaatactatgcaggtatcccttctttggtaacagggctggttaccaagttagttattttgtaattagtgaagagttggggcatttctgatatgtgcttacttagtgtaaacatttctagctctaccacttaaccatcattttaaacatctgttttaatataacaattcctgaaatgaaatcctcaataccagtctattctcttggtagcgttaatattatttatgtatttcagctgcttaatcttcaatatttatttatttattttattattattatattttgcgacacagtctcactctgttgtccaggctggagtgcagtggcacgatcttagctcactacaacctccgcctcccaaattcaagcaattctcctgcctcaacttcctgagtagctgggattataggcacgcaccaccatacctggctaatttttgtatttttagtagagatggggtttcaccatgttggccaggctggtctccaactcttgacctctgatccacctgccttggctccaaaagtgctgggattataggcatgagccactgggactggcctatttaatatttaaatgttaatttaattcagattaaattaccaaaaaattctggattaatgatgttgaaattaatgtgggtggtctgtattttcttctcctttaggcaacaatccggagttaactttaattcctttcattttactaaaccaactttttcaaatctttttttgggaaggtcagatagtaaatattttaggctttgtgggccacatgtggtctctgttgcttatttctttttgtttctttgctttttctatcacagttcttcaaaaatgtaaaaaccattcttaatgggctatttaaaaatagaccataaattagatttgctctattggttgtagagtgaatataagaagatggtacgtgaacactttttataaaacaaggttcatatgggtgtcagtcactgctcagatcttattaccatgtgaaatatttctccgtattttgtctatatagtttaaaaattgaaaatgcataggaggtagttaatgctagagatgggtggagaccctgtagaaacttacagaattgcagaattttattgctggaagaaatcttagagattatttaatataaatcccttattaattttacagataatatgactaaaggccgggcgccgtggctcacgcctgtaatctcagcactttgggaggctgaggcaggcggatcacgaggtcagaagatcgagaccatgctgactaacatggtgaaaccccgtctctactaaaaatacaaaaaattagctgggcgtggtggcgggcgcctatagtcccagctactcgggaggttgaggcaggagaatggcgtgaacctggaagacggagcttgtagtgagctgagatcgcgtcactgcactccagactgggcgacagagcgagactccgtctcaaaaaaaaataataataataataatatgactaaaagcttgtaaactcgtaaatatgattaactaactaacttacaaatcctggagggatagcaggccttcaaatgaattcttacgtaattcaaagaattttcactgagaattctgaaaaatgaaacagttatggctagatcaaaatgcaaactacaactatttgctacacaggactaactcctgtatgtggaggaaagccgggtaatggtaatttctttttttctttctttccttccttccgtctttctttctttctctctctctctttctttcttttctttctctctttctttcttttttttttctgagacagagtttccctccattgcactccatcacccaggctagagtgcaatggtgcaatcttggctcactgcagcctctgcctcccaggttcaaatgattctcatctctcagcttcctgggtagctgggattgcaggtatgcaccaccaggcccaattaattctgtatttttagtagagacatcacacctggctaattttttcttttttctttttttttgagatggagtctcgctctgtcgccaggctggagtacagtggcatgatctccgctcactgcaacctccgcctcctgggttcaagtgattctcctgcctcagcctcctgagtagctgggattacaggcatatgccaccacgcctagctaatttttgtgtttttttttttagtagagacggggtttcaacatgttggccaggatggtttctatctcctgacctcatgatctgcccgcctcagccttccaaagtgctgggattacaggcgtgagccactgcgcccggcctaatgtttgtatttttagtagacacggggttttaccatattggccagactggtcacaaactcctgacctcaggtgatcctcccacctcggtctttcaaagtgttgggatttcaggtatgagccactgtgcccagcccacaaactttctgttaggtttagccaacccttaggccaaggccacaaaaaataggaactccctaaatgcctgttgctggttccagttttcagtgtgcctctgacatctgtccatttttgtgtagtcacccaagttctcagttatattttaaatttttgtctagagttgatggctttgacttgcagaatggtccgtttgttaagtgtgtgaggggctcagtttcccatgctggaagcgacaagtttaatatgaactttaatcatcagattcttattaatttttttttccagagggagtcttgttctgttgcccaggatggagtgcaatggcacgatctcggctcactgcaacctctgcctcccaggctcaagcgattctcctgcctcagcctcccaagtagctaggattacaggcacccaccaccatgcccagctaatttttgtatttttagtggagacagggtttcaccatgttgtatacatgttggtcaggctggtctcaaactcctgacctcagatgaaccacccacctctgcctcccaaagaaaattgttcttcttggtgggtcctatcaaacagtacaaaggtgttttgtgtactcctcgccatcacttttactctgctctattcttcgttatagaacctgatgatgtgtatgtttgtgcgtggtctctcttcccacttttagtgggaaggaaagctccttgaaagcactgtgccctcactgtgtactgaatacctcagctctcttcaaaaggggagaatacaaggagaggtgggaaggtggaaggtgtgcacaccaggaaggggctatctcagcaactaggcttatgtacgagccagcccaatgagctcacagagagataagtcattgtggcttttaaccactgggtggcgctgctcactaattttcctaaaatcatgtcaagacagcaattgcttttcagcaactcaatccagaactccaagacctaaatccacactccaggacctggcttaaactgccatctcggtggagacacatccctgcactgatcccctcactcacagccaaggggccctatcacattgacttccaacccctgcccccatgcctaagtgtgaaattcatgattagacatttagtgaggccccccaggtacaaagggccctggatgggaacagggtaaattcgaagacgtggcccctgccctgagacaggctttttgaactggcttaagataagcagtagatgtaatgggttaacctccctcctgtgcatccagagtggtgttggttatgcatcatcctaggagaactgagaaagcagtcacaagttgtctgtgttctgtggctcggatgagaaacctcacgcatatgatctggaggggacagggaggattccttgttttttttttttctttggagacagagtttcaagtgcagtggtgcaatcttggctcacggcaagctccacctcctggctaaatagagatggagaacttaagagacttcataggaagattacatttgctgtagcaagttgactgaaactgatgttaagagtcctgaccagttagacattaaccatatttatgactaccttctcatggtaattagttatctgcagtctcctggaattccctgcaaaagacaattctgccaacattgaagaggtgccacattatgaaaaaaaatgtatctttgaaaactgcagtaaagcaaaaaattactatggttttttactatctctttgaacttttttttttttttttttgagacagagtttcactcttgttgcccaggctactggagtgcaatggtgcgaccgtggctcaccgcaacctccacctcccgggttcaagcaattcttctgcctcagcctcctgagtagctgggattagaggcatgtgccaccatgcctggctaattttgtatttttagtagagagaggttttctccatgttggtcaggctggtcttgaactcctgacctcaggtgatctgcccacttcggcttcccaaagctctggaattacaggtgtgaaccactgcgcccggctaagactcattttttgatcagaatgcaagggaggagcgagggggaagttctgagtgtgtgctaggggtggaaataactgtttcttgattcaagtgatttcttgattcttttgctcattacatgattccttttccatcagcatttgtgttgtagttgtgggaaccgataagtgtcacctgactctgtcttgcctcttccagcaagaacttgcaagacagaagcagcgtttctctggcaagggaacccataagcacccaatctctgctgtgagccaggtccaatactaggcactttacttatgttaaccagtgtaattctcccaataacctgtaattgttggtgtttccatctccattttttttttttttcgagatggagtctcggtctgtcacccaggctggagtgcagtgacatgatctcggcttgctgcaagctccagcacctgggttcaagggattctcctgcctcagcctcctgagtagctggaattacaggcatgcaccaccacgcccagctaatttttgtatttttagtagagatggggtttcaccatgttggccaggatggtctcaagctcctgacctcaggtgatcctcccacctcggcctctcaaagtgctggggttacaaacaagagccactgcgccggccaggaagcaaaataattgatggcacttttgaggactccaggaaggagggcagtcctgccgctcattgcacagcctctatccccttctccagccctctgtctccctcccctctggctctcaggggcaaagctgtttctcctggtttgcttggaacaacttcagcccttcctgtgaagtctcagctccatgtcctgggggagtgtccttccttaaccagggttgccaattcattttcttaacaaaggttatttcctccatgataggaattcctgctttagctgctaagagattaatactgttttccattttattatgatgtttgttccagatcctgtaccagaagctggcagttgtcacagcagccctgtaaggtatcagcgccattttgcagaagaggaaactgggctcataaataccaggctctggagagatttgaggtccctttctgcatttgcccattccttcttcaaagtctccttggcgagaatcaaagatacatgaatggaggccaggctctccagggagaccaggtcatgcaaaaggaggtctcaggctttgaactattgcttctttagtcagatgaccccaatctttcatatattcataccagcctcaggcttgtgtagatcagaggtttcttctttttaaagtatagcctccagttctagtgccagatcttctgtaatttgtagcatgacctttgctaaatcgctttccatctctggcctttaattcccttatcttcataatgacagaaagctcctttctgtcttatgttctgtggtcctagaaaaaagtcagattctggaacaataaggcctattgagcacttatctgctaagcactctctcacattgccttttcatcctttcaacactggggggtaggtatcataattgatctattttacagatgaggaaaccaaggcttaggaggattagtagttacccaagacctcacagtgagtgacagagttgggactcaaacatagatggtctgtcagagtctgagtgtggagataatactctttttgtttttaaataaaagatatggggtcttcttgctatgtcgcccaggctggagtgcagtggctattcacaggcataatcatggcacatgacagcctcgaactcctgggctcaagtgatcctcctgcctcagcctcctgagttactgggactataggcatgcaccactgcacctggcttggagacagtgcttttaaaccattgcatcagctgtgtccccaagtgccagctcaggctgctgatgactctcaatagttgctctcacacgtgcaagcacatgtatgctctcatgggaagaaaatatgtgttcatgcggcccatccgagaaagactaataatatttcaaacaggcctgctgaaaccagccgcaggacatctggtcatctgcttcaaggattcatggtgtctaagacggctgtgtagaaagaggacatgcgagccgtcctctgtgactcccagtaaaatgctctttgtagtatccagagttgttctctcattttcttcccttcctgttccagttggttcccccatgtacccagccacctgtattctacaaggcaaaaggtcagtcatacaagttgttcaagaaaaggtttatttgctttaggatgaccacagctggaaaactctgtatatcagaatgaccgaagtcctttctgtatttgtgtgtgtttaaggtcagccatctatctgcctgccttgaaaagactgggaatatccttcttgaaaagcaactgaatgcacgtgagaaaagctcttccagttctgaaccatcagaagtttctggcaggctttttattatgtgctagggtggggatttgactttgtgtatatagactctcgattactcaggttttcagactgacacctcagtgctcctgaatttaaaaacaaaacaaaacaaaacacaagacaacgacattctgttccagcttgccagaaccccggccctgagcttcctgtttttagccttgtcctgttttttaggcctttgaactctgactccctggctttgaccctggtgctggctaaggactttgaaacttcttgccgcatctgatgttgtcctgacttttctgtcaacctaggccctgccggcctcactcccacccccatgtttgctttggcctctgcaagcaaaggtctgggcctgactacattgtatgttattgattctgtcatccccaggctgggagctcctggaggaaggagtttgatcatatttagctgtaacccctgatagcaaggagggtggagagaaattcctggatcaaggagcagggactcacagtccagggagggaccaaagcaggtagcactgcctctgtggaggagcaagagcagcaagcacatggggctcctctgagtcaatgcccgggtgattgatgggttgttgcccaagttcaggtgcttttggtgcaagtgacagaaaccaagatctgcaaactctggctagcaagaaaagagagatacccacacgtccatcagcagattagctggataaacgaaatgtggcagatacatacaatggaatgttagcctaatgactaacaggaataacgttctgaagcatgctacaacttggatgaaccttgacgacactatgctggtgaaataagctagtcacaaaaggacaaatgctatgtgattccccttacatgaaatacctagagctgtcaaattcatagtgacagaaagaagaatagtggttaccagaggctgggggaggagagaatggtgagttagcatttaatgggtacagagtctcaggttgggacaatgagaaaagtctggagatggatagtggtgatgtttgcctaacaaagtgaatgtaggattgtacacataaaaatgtttagaatggtaaattttgtctatatatatatatatatatatacacacacacatacacacatacacacacacacacacacctatatatatatatgtatttttaggcagagtcttgctctgtcatccagcctggagtgcagtggtgatattatggctcactgcagtgcagtctcaacctcctgggctcaagcaatcctcctacctcagccttctgagtacctgtgaccacaggcacacaccaccgtgcccagttaattgttttttttttgtagagattaaaaaatatgtaagatctcaccataccgcccaggctgatctcaaattcctggactcaaatgatcctcctgcttcagcctcccaaagtgctgggtttataggcataagccactgtgcatggccttgttatgtgtgtacacacacacacacacacacacacacacacacacacatgttttttgagacagggtctcattctgtcacccaggctggagtgcagtggcacgatttcagctgactccccagctcaagggatcctcctgcctcagcctcctgagcagctgggaccataggcccaggccaccatgctcggctaattttttttttttttttgtatttttggtagaagtggggtttcgccatgctgcccaggctggtctcgaactcctggcctcaagtgatccgcccacctcagactctggaagtgctgggattacaggcgttagccaccttgcccagcccctgttatgtctattttaacacacatacatccatcatcccccgccaagaactgacctaaaccaataagttattcctgaggtgctaaattgccaccatggccctttaggaattttttttttaaattgagatggagtctcgctctgttgcccaggctggagtgtagtggcatgatctcagctcactgcaacctctgcctcctgggttcaagcgattctcatgcctcagccatctgagtggttgggattacaggcgaccaccaccatgctcagctaatttttgtatttttagtagagatgggccatgttgtccaggctggtctcaagactcctggcctcaagtgatctgcccgccttggcctcccaaagaactgggattacaagtgtgagccatcgcgcctggcctagaaatttttttaaaggaaagatgctgggacatctcatggaactgaaagaccagctgaagctcccagcctggagctggggcaggaagtgaggcagttccagggacctcaggacagaagttcatagacctctttccttgggacactgccagaaactcacttctgctctagcagcaaccagactgagtttctcaggtccaaatttcaaatctctctgagagtctgattggccagctagatgagatggccatcctgggaagatgagcttgggctggggaggcagctcgttttttttttttttttttttttgagacaagagtctctctctgtcgcccaggctggagtgcagtggcacgaactcggctcactgcaagctccgcctcctgggttcatgccattctcctgcctcagcctcccgagtagctgggactacaggcgcccgccaccacgcccggctaatttttttgtatttttagtagagacagggtttcaccgtgttagccaggatgggctcgatctcctgagctcgtgatctgcccccctcggcctcccaaagtgctgggattacaggcgtgagccaccgcgccggccaagggaggaggctcgggttttaacaacatggccactggggggcagttatgagtcagtttaccagaatccaattcattggcccgttttcagcttgacacttcactgcatttatttgtttctcttaaccatccggtcttaattacctgtcttaaccatccggtcttaattacctggcttttgttttgtcttcacaacagcgttttgggagaatgttgaatccaagcgagctgagtcagctgtctgctgttaagctggagacagaggggaagattgaatataaatggcccccaaccttgacaaaagtctcaagaaatgtggagaagcccctgaaaaaaactgagattaagcttctttcaccctagcagaaaaaaaagcaggaggttaggaatcaagctgtcaaataagggagttttatttattgcatgtttgggttttggactaagagtttacccctagccgtgtctcataccctttctttccctgtcctgcaaagcttaacatgggaggtagagatttgtgtctcttcttcttcttcttctctctctctctcttttttttttttttccaatcaggcactctctgtacccctgccaccctgaggaagacaaaatatgagaggatctagcaaagtctctgcaaaaatgattaatgtgaatattcccatccggacttcctatgaaaaagttgcattataaaatgaaagaataattgaagaaaatatagatccagaaaaatccataaagatggacaggaaaaatcaagagttctatggggctcttaatgggtcaagacccagagggcaaagatcatctggaaggctggaaactggctaagtatttagaatggcttgtgtactggtgtgaagtgaggaattgaaagagagcaggagaaggatgtgaaatatatttttctgtgtattaagagtgcactggccggatgtggtggctcacgcctgtaatcccagcacttttggaaggctgaggcaggtggattgcttgggcacacgagtttgagaccagcctgggcaacatggtagaatcccgtctctaccaaaaatacaaaaattagccaggtgtggtggcgcaagcctgtagtcccagctactcgggaggctggggtgggaggatcacttgagcctgggaggtggaggttacagtgagccaagatcaagtgagccaagatcacaccactgcactccagcctgggtgacagagtaagaccctatctcaaaaaaataaaaatataaatataaaaataaaagagcgtacctctgcccacgtcccttaactttggtatttcctcctaagattgagaaaatattcgaaatacttctcctttattttgatcattgttctgcttctctcaatgtgactggctagtttcagcctaataaggcttcccctgttttcataggtttacccctctcttctgtaaacaagggcttccactaaagcctggtcatcactgggagttgaggagctggggttgaccattctttgctgtaataattttaaccgtggacaagttcctggtaggcagcaaaggtaggttgggatccttgatgtactcttggacccagtcgtcattggggttggtgcagacttctcggttcctcttggtgacgaagctgcagaggcagaattagaccgtcatgggctgcagactcgggcaggagtccggtgcccacccccacctctggttcacatggagctcaccttatgttctttaaagcttccctgggcctgtcctggctgggttccctcagacagcctctctctctggcctcagaaccttaccatcccttctctcagtcccttctccactcagcctagaccctcaagcttgggtttcataatgaaccacatagctaaaagtggcaaaattaggaattaatcccaggcccctgagagccaaaggccaaacccttagccactgctccactgcttctagcatggagacctcttgatcccatgtatctcattcctgcccctgggctccctgtccctctccacagaaatatctaaaaggacgtgcttacatgattgctggcaggtgacagttgagggcctttctgtatcccaccactagtctccttggcaacactttctcataatacttcaggcagcaggtggatggggtgttcacccactcaggaacttctgaaggaatcacattgcaagctgagccagggaagcagaggggagaccacagctgcccacctctgtctcccaccatttgtgtttcactcctctgatagcaaagccgtctgttagaggagaccaatgatagcttgactggtaatgaagtgcataagatgaatccctttgggggacatacatttagaaccctcagcctctgagctgagtgtcaactacaaatgacttagttattcacacttgccaaggaaccgggaggaagctggctcattcttttgtttattggtgacttgatcgggcaaacatgtgttgagctagtattatatgctgggctctatgggggtaaaaacatgaggaagatacagtcactacccttaagtaacttacagactagtcagggttgaaagagaaattgaaaagttaaacaaacactaccacagaatgtggtccaggatagaacagactttggcataaggtgctatgggaacagaatgaagggcccctaacccatccttggtggttgaggaagaagtctcaaagcaagtgaggcctgcattgattcgtaaaggatgagtaggatttagacacacggctgggtgtggtggctcatgcctgtaatcccagcactttgggaggccgaggcgggcggatcacctgaggtcagaagtttgagaccagcctggccaacatggtgaaaccccgtctctactaacaaaaattagccaggcatggtggcacatgcctgtaatcccagctattcgggaggctgaggcaggagaatcacttaaacccgggagtcagaggttgcaatgagccaagattgcgccactgcaccccagcctgggcgaaagagtgactccatctcaaaagaaaaaaaaaaaaggatttagacacacaaaggacttgtagaatctggaagaaagaaatgcaggaaagcctgaaggtaggggaagctcagtgtgtcttgggagtgctgggcagtttgggtggctggcatgcaaggtaggaagaaatgaatgggcagagatgaaactggagagaggaggagggtctggtcacatacctgctgagctactgaggaatttggactctatcttagaggtattggagaggcggaggttagggggaagggtgagagagtagagcctttagagacagaagttagagcaggaggaaaaagtatatgatttaggctttggggtcagacagcttgggttggaattttgacttgatttgaattttgacttgaatcatgggcaaatttcttaatctccctaggtttcagtttcctcatctattaagtgggggtaaatgatacttacttgtatcctaggatcatggttagaattcggtgagaaaatgattggaaagcccttaactcagagcctggcacacagaaaggctcaatcagtgcttattataattaagagccaatggtagtaatgactgctcttcttgccttggaaatggcgcttccccccatctctttgatgtatgcaggatactggacttgattggttattgtcactgtgtttcctttgagctgtcctgactacccatcaattggggatactacacaagaggtcagtccagagatctctcccagcccccaaaccttcagagtgcaaatctttttgtagcttgacccctttgcctccagtgagtggcaaagcttgggacatcttgagagcaccatcttgctgatccatgctttgggtgggccattttctctttcttgaagcctgaacccactgcactggcctgattgactctcccaaagagcactgttcccccctcccacacagtccctctgtaagtgatgctcatatcactggttctcaaagcaaagtttacaaagaccagggtcatcctgagagtatgtgggcagattacatggtgcacttgacccttgctcctttgtgtttacacaggcagagtcaggccagactacatgccagggtgaccttaagagagaaaagaggccaggcatggtggctcatacctgtaatcctagcactttgggaggccgaggtgggcagatcacgaggtcaggagtttgagaccagcctgaccaacatggtgaaaccccgtctctactaaaaatacaaaaattagctgggcgtggtggtgtgtgcctgtgatcccagctactcaggaggctgaggcaggagaatcacttgaactcgggaggcggaggttgtggtgagccgagatcgcgacactgcgctccaacctgggcaacaagagcgaaactccatcacaaacaaaacaaaacaaaacaaaacacaacaagcaaacaaacaaaaaaacaaaagcgaaaagaatggctggggcagcctagggcaggtacacgtctttgtcctccccacccccgtcaccaggtcctcgtaaacaatgatagagggaggagatacggaggggcaaaacaaaccccctcctccataggccccaattctccctttccccacagctccaaaacctttcaacccctttcctcttttctgcagattttatttagtcataggctgggggatggagaaggggaccatagattcccaagcagccattccactgggactcattttggttgtctgatagtcccagcaacctgtgccagccatgttgaggaagggctctctcggttcagactcccaattcctggacttagacccacatgattgtttgaaccttccttcctctcgccactcattcttccagggcacctgccacttttctttctcatccgcgtgcctccccctccctttcattgcatgcacttcttgttgcattttctgctgctttcttggcctctcctcctgaatgatcattcctgctcaccacgcttgggactcctgaggaaatggtgacccagtttcctggaactacttaccccagaaagatccggaccaaccccagctctacttacaaaggggagaattggaggtcagaagctatgcatgaaggtggggagagcccacagggtcttatgaggccagagacccgacagcgcccttggcactacctccctgccagctgctccatccccctttctcgttcctgccctacagagacaagtggactcacttggctggctgcgagaagccgaagtaatgataaggatgaggacaaggagagacagggcagcctcggagaccttcatcctctcagcgaggcagtacagcttcagggagagccgaatgaagatgttgtctgttgctggtggtccgcttgccaactactcagctctctggaccttgaccgcatcagagccggtagaggaggagaaacaacaggcctcagtgtttgctgaaacagagggcagcagaggatgggacttggtgcagagctgaattcagtagaatctgaattcacgtgaagaaatgggcgaatgtgtgtcagctaccttacatgccctatcttatataatccttaaaatagtgaatagcgattattacttccctgggactactgaggcctagaggctaaataaattgtccaaggtcacctgggtggataggcggatgaaaaaccagatctgtttgatttcaccatgttacctgccaccatctgtatgttggggaagggcaggcagggttgaaccaccccagcttcccccaggtgatcagtcttggggagatgagcacaaagcaggattacagagcccagactgaggcaaaggtagggcttagttgcctctgagaaggaaatgccctctcccagtccaaggccacatgattgagctcacactctttcctgtcacagtgtatgctaatactccaaaaaaaaaaaaaaacaatgtgcctgatccttgggtccccatttgttgctggaccgtttgacttatttgtcaatgtttttatttatctctttggacctcggactttggactgatttttaggtgtagccagctcgctgatccctcctgggtgcccccatggccaaccatgaccagcaggggaccctccaactctgtgcacctgacaacctgcgtctgtgctccaggactccagcttctgcccctctggcctgggctctggctggacctgtcccacagcttcctctctcttcaggtgcctcaggacccttttccatgttgaaagctgcatttagagaagagatcaaagatataagggattttgctgttgatggacagcaagctttagaggcataggtgatgtgtttcaggtgttgagggcagtgggaggcaggggcagaaacagggactgtgcagatccttatggggctttctgcttggcatgactgctcatagataggtaaaccgtataatgcagttactcctggtgggttcaaggcttcacctggtggtgaagctgtggctttttgtgagggcagggagggtacgtatgtggggcatcctcttgacctctgtttatggaggtgacaaggcctgagaagcctggttgtgactttggcatgcaggcccccatatggcccttaatgtggcccacaagcccttccttatctgtggaaggctggaggccaggaaagggtggtcataatccctactctgggcaagctcttattccaagtacacagagctcctccttgggccctgaagataggtttgagagcttattcttggagcatagtcctcctcttgatttctgtcttattccatctgtccctctatccctccctccctctttctctccatccatccatccatccctccctcccttcctccctcccttcctcccttcctccctcccttcatccctccctgcttccctccctccatccattcctccttcccttcatccttccatccacacattcttcccttccttcatccatccatccatccatccatttcctgaacacctggtatgggctaggctttctgctaagccttctaggggataaaaaagttagtaaaacaatatagtataatctgatgtgtgtaagcgaaggggaggggttggataaaatgtcttcatgcatcattcctattccagacagcagtgaagaaaggccttgaaaacagcacagaaaaaaggactatggagtttgactgctatagagagccctttatgaagtgttacctaaaaaatcaaatgatgatttgtagcttttacacttgtcatgaagcttaaataagataatgcatacagactgcctagcagagtgcttggagtatagaaagcattaagaaaacggggtctgctactgttgttgctgaggaggagacggtctttacactgcttttctttctcactttctgcttctcactacctgcattgcaggcctgacctattttttgtaccaggctccagcaaaacttctgcagagcgaggcttgatgccgagggtgccacaccctggtgtcctcagtgcatggccaatgagtaaatcccgtagaaaggaatgaggccagggaagagcatgagtggtctttaattcaaagcagggaagctccaagagggtgactggggctgagagttagcggtgggtggaggagggggccttggcatcttctctttatgtctctgagctgtgccttcgccaccccttctgggtcactcagttctccttcatgtccttgatatagtcctggacccacttgtcactggggttggtacagacggaatggccccttttggtgatgaagctgtggagcaagagggagaaggatcacaaaccgaggggcccagtggccggaagagacagcccatcttccctccctcctaaattccccacctgacctatactgcttttcctttcttccacagaggcagcttagagccagtctcctctctgagacatactcttcggttcctaggacccctagacccatctagtctctgtgtccccctgaggaagtgccctcttgccttcttctcccttctctgtcatctccccatccatggggtcagtttccccatggctcctgcaggctccagccagaaagcgctcagattgcccctcagctgcctctccccatgtagtcacacctgggaggtacgctgggggtccccattccaccaccactccctgcttccctccaggaggccctgctggctccctctccccccagtgtgatgtgtgtgtaccacctacacaattccgggcttggagcactggctgttggtctcatagtaatccataatccgctgacgcgggatcttgtaggtagtgtaggtgaagcagcactctgaggggtggtaaggtccccctgaggagagagcatcagatgctgaggaggggccccttgttaaaggccataccattggctgctcctgcaagctgagggcatggaggagggaaggaaggaggagacagcccctcagaacttggaggggagagtaggctttcctcatcttctcttctccttctccatggtactcctgggctcttctttttctcctccctcatcatcaatcacccttcctccttttcttcaacccctcttggaaagactggtggatgactttcaactccaggattgaagagcagcacactcagatcttcttacaccatctctgggggccgactggcagagaaggctagggacttggccaatatcatgcagccttcatgccttattcgggaaaggtgctccaaataggaggaatatttggaagaaatcccaatagggatttggagacatgccatttgggaatgcaaacccagcccctcctagtgctccaccctgcccatgtccccattgaaccgacaacctgcagagagagcaggatgcccacagcaagccccaaggacaaaggccacagagtcagggcacccaaatcctaacctaaccttgcctgtgcttcctgtgtactgtggccattttactttccccctgttccctcctctgtaaatgaggcccttggactgcatcagtggtttttacactgagctccctggagctctgggggcctcagggactattgtggaggccttgctgcatttgagagtggtgtcttgtaccctactcaacccattttttctgttttacatattgggcctctgtggaagatattgcttgaagaaaaggttttgtggtctaaaaagttttaaaaatcactggattgggtgattttttcatctattttctgattgagaagtttcatggcttttataggagaagcaaggtgacagcagccaccccaagcttgaattatagaggtagcaggaaggacattgtaggccaagagccctgtacaaacaggcacatgttgtggttatggagtggagaaatcaggtgtgtgcatgttatgtgaccctgcttcatagaatcatggatgtgcatcacaatggcctcagaggtcactgagggtggccagatgtctgggtggaagggtctcatcctgttttccagctccattccaggcagcatcctcacgatccaaagaacggcataaggggcccctgtttcctgagacccagtcagagctcctatactctcccaccttgttcctctgagctgacaaatgacatcggagagggcaagtcaaactgtgcacatacccaccaactttagctgtattttaacaaccttcggtttccccccagtttctgaaaaggagagtaggtaaaatggaagagtgataaatagttttggttatctctaaaggcagcttattctaagaaatcagctgagaaaagggggcctaggatggaccccacactgtcgtgtttccccccagcccatacccaagcaatgctgcactcactgggcacaggtgacgctggaagcaggctgggcccaaacctcaggaggccaatagaaaaatgcccttgaggggctcaagacactgctcctaatctccctgaggaaatataccccaaatggggtgggccactcttttgcttagcggcaaagagagagaaattgagggagtagagaggcaggctggtctcactccatgtccttgagggcaaggggggactggtcctggggggcaatgataagagatcaaggccatgtgaggcctggagattcaggatctgtttatttggagactagagggcatttggggtagtggaatgaagcctggagtctcccaagtcaagtctcattggtcaaggctggaagatcccaacttaaactcttaagcagaacctacagtcctaagtctcatctccatcctgctcaccacaccatggggtgaagtgctgtggtgctcagtagataattcatttatataatgttgctatacacacaatttcaagaagataccagccctcctttctgagtccctgctcctggtcttcccctgagccccaacctcactcctgcttatttccctgcaggctctaggttggaaggaagacaaggcattgcactcacgtgaggaggattcagtcttggtccctagggcgatggtgatgaggaggaagaagggaatggcagccacggagatcttcatgctgtgggaagctgttgtgggaggagagctggcctggtgggagcttcagaggctcctgcggtgaggaattgttgagaaatgatcattgaggccaaatattttttaaaataagggagctgagacttggaagggaagtaggaaagcagtgatgcctcagcaatttcatatcctgcacatgtgttgttggtggcctgaaggaagcagggagagccaaggtttaagggaggaaatggtcttccatccccagtgggaagaagttcaactcttttgatagaagcctttccctaggcatgaacatgagcacagggctgggggcactgtgtcacacttagcaaaagatctcaaggctggatgtgtcctgtatccaattccatctcaggccttagaacaggccacgtggggcctggacattcaggatctgttcatctagagactagagggtgtttggggtaatggaatgaggccaggactcctccaagtcaggtctcattggtcaagggaaatcctaacttaaactcgaagcagaacctgcagttctctgtctcatctccattctggtcaccacaccatggagtgaagaagtgctgtggtgctcagtagataattcacttatataatggttgctatacacacaagccactgtcccagttgccttatgaatattagcctatttaatctttagaacagcagttgaggaaacaggctcagaatcaaagcctaagcttttgacagttggtaaatggaactggggttcaaattcaggtggtttggcttccaagtctgtgttctcacccattatgccataaagaaacatgggactcccaacggagctctgtaaaagcttatgggttttctataaagcctttagtcttagtcctttctgaaatcagatagtggatctctttgggaccttctcctggtttctctgacttttgctgcaaagaagcttggtgggaaccctagaaaatgtctaattcagggatagctagtaggtttcattgattagtggtggactggagctctgtgttggaaatgattctgaggccatatccaggcacattgggaagatacgctgtgaccaacgtgcagtttctgttgcagtgcagcttgcatgctatgtatctgccatttgatttgtctaaactggccatttactgaatggaagctgggaatcagaaaggaccagtgactttctcatgtgcacacagtgatttggatgcaggacagatctcatctccgcaggctctcagcttagtgccctcaccatgctgttcttggaggtacatcccccattctgcttgctgatgtggttagatggttatttaatctcctctcctcatctgaatcatcaggatggagaacatctattatttatctttgcccattcacgcagaacctagtgtataccaggtgctttatgaatatacattttaaaagaaggatgaataaacaaattgagccaggtctacatatgtgtatcttataggaaatggctgaaatctcatggttagttgtggagacagtcatcaattaaaaattttctatatttcttatcatcaataacaacattatgtaaacccttcaagttaaatgataataattgttatcaggaacaatctcaggaaacaagttgtttataggaaaagtgagttggaaagaaataatgcttacttcttgtttttgtggaaactagccaacctgccaagttgtttctaggagacttacaggaagttcctgtacttttccagcaagtattgagttcctacctacattagtctgtgtgtgccaactgctatcataaacaatccagcagactaattaaataaaagtttatttcttgctcatgttacagtccagtgtgggtcagtagtgggatgatggtgtgtgtgttgggatcctccatgtactcattcaggaaccaggcctttttctaccttggatgccaccattttcagcacaaggcctccaagcttgatacaaaaagggagaagcagaggaggattgggagatttttgtggatcagttctgaaaatggtacaaattactttcacccacattccatggccagcatcaagtaacctggctccaacataatgacaaagggatggaaaatatacatcatctgtatgcttaggaagaaaaaggaataggttttgtgaccacatcacttctttgacacagtatcatatgccaagtcctgggctaggcttggagggagggattgaagatgaccctgatcccagaggtctcagaactcaaagagggactaaaaaaagtaaaggagaattgcaatacaaccagatgaatgaaatttgatggcaacataattagagaccttaaatgtcctcctgttgccccctgttgagtatgaagagcctattttaaaaatatttaaaatgtttttcaaagcaacacatacatatattggtttaaaaaactgaatagtacaggaaggatctgtaggacataaaccttctgagttcatgcttgcctgaagaagtcattatttagccttcatacttgattgatatttttgttgggtatagaattctacaatggaatataagaatatgtttcttctgaaactcatttgtggtgatctggtgtttcccctctctagaaaattttagggtttattctttaatcttgttttcttactttttggcacaaatagatgttccagactcatcttgtactttccttggcccagctctggaattagccatttcttccatgagtctcagtttcttttactgaaaaatgattttgagaaaccaaaatctgagtgcttggtgtgttcattgctatgggaatggcatcacttttagatctgagcttttagtggctagaacctggaaatatatgtaagcatatgtgtataagtatgtatttaaatttatgtctatttcaagtatatctatttcatatattattagcaatttgtttttgtttttgtttttgtttttgagatggagtctcactctgtcacccaggagtgaggtggtgcattctcagctcactgaaacctctacctccggggttcaagtgatcttcctgcctcaccctctggagtagctgggactgcaggtacaggtcaccttgcccaggtaatttttgtatttttagagatggggtttcaccatgttggccaggctggtcttgaacttctgacctcaggtgatccacccgccttggcctcccaaagtgctgggattacaggcgtgagccactgcgctcgtcctattattagcaatttctatgtcctctttctagctatatgaaaaaacaaaagtttataccactatgtccaattccaagtaaacaccacagagttatttcagtctttcctgtttctatgtttccctccctcctctaacaatggggactcctgctcccattaacctcaatgtatgtacttatttgctgagttccctgtatgtaacaaatctcctggccacactggctgtattctggcctctggtcccactggcctcaaccatgtgcatcatcttctctgccctggccctggttgagccctcagttgaggggatgagttatattacttttaaatcttgtctctggttctaaaaagaataaaaatatgaatgtttctatttcctattttatgtcttgatgatttctgtgaagctctgtttagattttttttttttctttgagacggagttttgctttgttgcccagactggagtacagtggtatgatctcagctcaccgcaacctccaccttccacgttcaagtgattcttctgcctcagcctcccgagtagctgggattacaggcgcctgccaccacacctggctaatttttgtattttagtagagacggggtttcaccctgttggccaggctggtcttgaactcctggcttcccaaactgctgggattacaggcatgagccactgtgcccagccctctatttagatttttaagatgacttttatgcacttttttttctagctattttgtacaatttccaatttttttttttttttttttgagacagggtctcactctgtcactgtcactccaggctggagtacagtggtgcgatcttgcctcactgcagccttgacctctcgggctcaagtgatccttccacctcagccttccaagtaactgggactacaagtgcgcaccatcacacctggcttatttttgtatttttagtagagaggaagtttttgccatgttggccaggctggtctcaaactcctggcctcaagggatctgcccactttggcctcccaaagtgctgggattataggcatgagccactgcacccagctcaagatttttacttttaaaaattccaaattgatcgtcagactatttaaccatgtgtaaaactttttccaactccatatttcttttataattaaacagctttgatgagcttcatcataaaaaaatcagatatcaacacaagtgaagagctggcccattttgttacacatccttgaaaagacaattaagacgcatttttcaactcttttattttttgattactaaagaaatatgtgcctttcagaatactgcaaacaatggtgaagttacaaagtcctcttcaaatttccactgcattctgcagcatcagcgttacctggaaacttgttaaacatgctgacactttggccctacccctgtcctactgaaccagatttctaggggtgggagcccacaatctgtgttttcacaagccttcctggtggcttttatgcatgctaaagtttcagaagccctatctatcacacagctttctaaatgctgtggttcaatcttatgttggtcccttcagtcactggccagtccaactagggcctggggatacttgagtcccaggttggttgcctctagtataaatgtcctcctctttttgctccgatgttgcataaaaatgtggagacttagcaatgaattagatatgactttttgcacccaagcatcattcttattcctattttcagtcttctctataaactgacatattcttttttattttttattttttttgagacagagtctcactctgtcacccaggctggagtgcagtggcatgatctcggctcactgcaacctctgccttccagtttcaagcaagtttcctgcctcagcctcccgagtagctgggattacaggtgcacaccaccacgtctggctaatttttgtgtttttagtacagacggcgtttcaccatgttggccaggctggtcttgaactcctgacctcaggagatctgcccaccttggcctcccaaagtgctgggattacaggcgtgagctaccgtgcccggccctggactgacatattcttgaagggcaatagtctactttgtttggttttcatggttttcctaatgcctagcacaatgcataacctaaagcagccactcaataaaaatctttttgagtggcaataaatacatgtttcaagattccagagaaatggaggtgggtccttctggctgggatgaagggggaaggttttatggtagcatttaatctaagccattgaggttgggttgagttttgctgggcagagttgagaggagggcatgcctggcagagggcaccacacaaagcaaggaagcaaaaaagaacatgctgtttctgaggaactgcgagaacagagtatgtattatgcaattaacctgcacatagcatgtttttttccccttcaagacctcaaagaccttctgtgagtggctagatgcttggttagaatggaaaatcttgggctgggtctggtgggtggctcacgcctataatcccagaactttgggaggctgaggcaggcagatcatttgaggccaggagtttgagacgagcccagccaacatggaaaaaccccgtctctgctaaaaatacaaaaatctgctgggcgtggtggtgggtccctgtaatcccagctactcaggaggctgaggcaggagaatcacttgaacccaggaggtggaggttgtagtgagccaagatggcacccctgcactccagcctgggtgacagagtgagactccatctaaaaaaaaaaaaaaaaaaagaatggaaagtcttggttttcatccctcatttctgttgagttgccatgacccaacaccttcataagtggccctttggcatccacactgcccagacgctctccctcctcatttcatccttctaagctaaaaacctgacctgtcagagagaacccagtgaaaccacatgaatcctacttaggtctaggacaattttaattgaataaccatttaaatttttttctaaggctctgagacaaaatctccatggagaatccagaagcttccggattgccatcccctagtcatatatttaggtaccagtgagctgctttcaactcaaagcttctgaattcaacagcattcagtggagcagtgagagagacataaaaggtcataactggatcaaaatgtatgccagacgccaggtgtggtggctcacacctgtaatctcaacattttgggaagccgaggcaggaggattacttgagcccaggagttcaagaccagcctgggcaacaagtgagaccatgtctctaaaaaaataaacaaaattagctgggtgtggagtggtgcacgcctgtagtcccagctactcaagggcctgaggtgggagaatcacttgagcccaggaggttgagccaaggtgaatgagccaagattgtgccactgcactccagactgggtgacagagtgacagcctgtctcaataaacaaaacaaagtaagccagaactctgagcatctgtgtttgtctttttcatctctgtaaatcttgttgaaatgacagaagaaatataaaaataaatagaactcatagtagcagtaaggagtcagaaaatatgacattggtctaccataaggtgagacatttctgttttatataaagaacatggggccaggtgcagtgactcacacctgtaatcccagaactttgggaggccgaggcaggtagatcacttgaggtcgggagtttgagaccagactggccaacatggtgaaaccccatctctataaaaactacagaaattaaccgggaatggtggcaggcacctgtaatcccagctactcaggaggctgaggcaggagaattgcttgaacccgggaggtggaggttacagtgaaccaagatcacgccactacacttcagcctgggcaacagagcaagactccatctcaaaaaaaagaaagaacaaaaaaagaacatgggtcagcttgatggcagatcacaagaaggctgaaaaaacatgtatcctcatataggtcaaggagaagatcatagaaaaagaggattttcccagcagaaccctggataatgtgaagatcagagtcagtgggtactgggagaagacatttgcattgagtgaataagctatgaccttgctagttcccattcaggatagtcaggtagggcatttgccccaggataaagctacaagcacagttttcaaaataaaaaaggatatttgctgtgggaacctcttggaggggacagtggaccagagagagaattgggcagtgccctggataacttctggtcaaggacaagaaaactactcccatccctatccccttactctgtctgccagacattaagctgacaacctcaccaatgatatgaaagtcctaaagcctctgccaaaagtctcctggaactgataaacaacttcagtaaagtttcaggacacaaaatcaatgtgcaaaaaccagtagcatttttatacaccaatagcattcaagctgagtgccaaatcaagaatgcaatctcatttacaatagccacacacacacacacacacacacacaaacgtagtaatacatgtaaccaaggaggtgaaagatctctacaatgaaaattacaaaacactgctgaaagaaatcatagatgacatgaacaaatggaaaaacattccatgctcatggactggaagaatcaatatcattataatggctgtattgtccaggcaatctacagattcaatgctgtttctatcaaactaccaatgtcatttttcatagaactagaaaaactattctaaaattcatatggaaccaataaaaagagtccaaatggtcaaatcaatcctaaacaaaaagcaaagctagaggaatcatattaccagacttcaaagtatactataaggctacagtaaacaaaacagcatggtattggtacaaaaacagatacatagaccagtagaacagaatagaaaatccagaaataaagctgcacacctacagtcatctgatctttgacagagtcaacaaaaataagcaaaggggtaaggattccctgttcaataaatggtgctgggatagctggctagccatgtgcataagaatgaaactggacccctatttttcaccatatacataaaataactcaagatggattcaaaattcaaatataagaccttaaactataagaaccttagaagaaaacctaggaaacaccattctggacattggccttggcaaataatttatgactaaatccccacaagcaattgcaataaaaacaaaaattgacaagtgctcaagtaaactcaagagcttctgtacagcaaaagaaactcatcaacagagtaaacagaaaacctacagaatgggaaaaaatatttgcaaactatgcatccagcaaaggtctaatatccagaatctgtaagtgccttaaacagttgaacagccaaaaacaaccccattaaaaaataggcaaaagacatgaacatacgttcctcaaaagaagacatataagcagccaacaaacacatgaaaaaatgctcaatatcactaatcatcagagaaatgcaaatcaaacccaaaatgagttactgtctcacaccagtcagaatggctattagtaaaaagtcaaaaaaataacatgctggtgacgctgtagagaaaaagggaacagatatacactgttggtgggaatgtaaattagttcagccactgtgaaaagcagtttggtgatttctcaaataacttaaaacagaactaccattcaacccagcaatcccattactggatatatattaataaaaatcattgtacagaaaaagacacaagccctcgtatgttcatcagagcactattcacaatagcaaagacatggaatcaacctaggcgcccatcagtgtcgactggataagaaaatgtggtacagatacaccatgagctacttcttatgtagccataaaaagaatgaaatcatgtcctttggagcaacatggataaagttggaggccattatcttaactgaattaatgcaggaacagaaaaccaaataccacatgttttcacttgtaagtgggagctaaacattggttacacatggacataaagatggcaacaataggcgctggggactactacaggagggagggagggaagggggcaacggttgaaaaactattgggtgctatgctcagtacctgggtgatgggatcagttgtaccccaaacttcatgcaatatgcccaggcaacaaacctgcacgcgtaacccctgaatccaaaataaaagttgaaattataaaaataaagacaatagaaaaagaaaaaaattctaaaaattcccagagggtctaaaaattttttttcttactaaggaataagaaatcaattggctttggaattttggccctgtctgagatgctagaagacaattgaagaatgtctacattattctgagagaaaattattttcaacatgaactttcatattcagttgaaccattttcacacttaaagaccaaagtttttagaccttcaaagtcccagaaagtttattgttcatatcagttggagttttttgttggaaagctatacaaactgactctggttgattaagcaaaaaggactttactgcaaagattttaggtagtatcaggaaggcttgaaaagtaggtagaggctgagtgcagtggctcatgccgttaattccagtactttgggaggccgaggtgggtggatcatctgaggttaggagtttgagaccagcctgaccaacaaggcgaaaccctgtctctactaaaaatacagaaattagtcaggtctggtggcaggcacgtaatcccagctagtagggaggctgaggcaggagaattgcttgaacctgggaggccgaggtagaatcctagagagaccagctccaatgccacatccaaaatcatgccacaagagtcaactggtgtgagtcctctctttttctgcttctctgcaacacctgttccaggctcagatctctgaaagggagcataggttggccaagcctgagttggggatgcctgccctggcacccatggagcaaaggagagtgtttgcttttgtcatcttttaaagcagaaggcagttcaaagatattctagcaaaatgaaaaataaacccttttaggaaggaaggaagaggaagaggaagttttgggctacgtgtcatggtggaatgaactcaggtgtgtgatgagaagaaatcccagtatgacttattattattattattattattattattttggcaggtccagaaagcatttctgcaagttggaataggaagttagaaggtccttgaagactgtctcgaagaatgaagtagttaccatgaaaccgatggtgtaaatatgcaagtgcaaatgtggaatgataaggaaacaaaaagtatttctctttgggttaatagaaaaatatcaaaaggaaattatgagaaaaataagaattgttatgggattataatggatcaaatgttaagtaaagtagaaaatggtgtgaactgggtaaatgatggagtaaaagaaactttcttgaaattgtagccaaccctttgaagattagctatttcagtagaagggagaagatgagatataaggtgaatttgtatttaatcatgttggggctcagcagttgcttcagttttatattagtttatttcctcttaaaactcaagcaaagttaaaaaattgaatactctttattagatgcattactttcattaccagacacaacaatatatatattttttaagtatttcagaccaagaaactcacaggaggtgttggaggtgggtggctggcctcttttgtctctttattattatattgagtagggcttcagctttttcatgcaatcctgaactcccggaccactgggtttggcacagacttgccgccccttcttggtgaggaatctggggaacaagggagagaaagattacaaactgaggtgtgggcagatggagacagggggccccatcctccctgctcctcagatttcccagtcaacacagcctgttttttcctttctctgctgatggcagctcagggacagtgtccttttgagaccctctcagcctgtgggactccttaatgactcatggaagtgtccttgggaagccttgtgcttgctttcttcttccttccctatctcctctccactgggagtgtctcatccctgatgccctgcagaatcctcgtaaggacacagctgccctgtatctggcaggatccagagggtggaacccgatggacgcccatccgtcgtgtcctccctgcaagatgctgtgggctgcttcttccccaacacatggttggtgagcttggcacttacatgacacctggcttggagcactcgctgctcgtttcaaaataacttttcatgagtgaacacgggatgctttgtgagatgtaggaggtgcagcagtcagcagcaaagtgaaagcctgcagcaagagaaagcgtcatctgagggcaaatctttctcctcgaaagcacagtggagggtgagaaggcacaagcctctgaagacatgtttctcctcctcggctagcacttgctggcctctccctgcttcagaccctccccagggttttgccatgtgtctgagggcactcagggtgggccacagcaggaccaagaaaatttcccccagaaggggaaggcatctgcagacacctgcaggcatcagagagcaccttcttctccaaaggagcaggctcttggggcagccagaggggaacagagaaggcatctatggagggggtccccctaccctgtcctgatctcccttggagatattcaccaccctcaggaccctctcattctcctcccattctgtaaacagggacaatggatcccatagtgcagacctgcacctgctggctgcttttaaatgtatgccgtatctgatcacttactgttcagaactactggattttccagtggaagctttgacatcattaactctgtctctgcatctgaaagaaacagtacagggaaggaaatcactgggtggcagcagtatgtttcaacatctccacccaccccattgctcatcctcctcctgaggcagagaggctctgaagctggaccaccaccacctgtctgggttctaggcctgcctcctggcccatttattccattagggccctgagacttttcagagaccttttgaaaatgtagacatgaaaactttgtattgactctgaaatactaaaagcaactgaacctcacacggttcagttaatggaatgtctacatgatgtgacacagtctacaagtttttctacacatttctggaataattttttattatagggctctggaaacagagaggttttatcagcgtttatggtggcacagtatccccttaagtgaagtgagtctattatggtatttattcatcccagttagcagaaatattcatgtgtttgctacagaaaaattgctgtgtttgattgaaatagtcttccttggccccaccaaggataagtaccatctaggtatgtattacttttttttttttttttaattgagacagggtctttttctgtcacccaggctggggcgcagtggtatgatcataactcactgcagccttgaggtcctgggctcaagtgatcctcctgcctcagcctcctgagaagctggaactacaggtgcgagccacaatgcctagctaatagtttacctttttgtagtgatgaggtcttgctatgatgcccaggctggtcttgaactcctgtggtcaagcaattctcctagctcagcctcccaaagtgctgggattataggtgagccaccatgcctagcgtgtattaccttttaaaaaccagagaaattctgtattccaaaatacatctagcctgataggattttgataagggattgcatacctgtattatgctaaatagaaaaatgcagccaggcgtggtggctcaggcctgtaatcccagcactttgggaggccgaggtgggcagataacgagatcaggagattgagaccatcctggctaacatggtgaaaccccatctctactaaaaatacaaaaaattagccgggcgtggtggcaggcgcctgtagtcccagctactcgggaggctgaggcaggagaatggcgtgaaccggggaggcggagcttgcagtgagctgagatcgtgccactgcactccagcctgggcgacagagtgagactccatctcaaaaaaaaaaaaaaaaaaatctttacagtggccaggcgcggtggctcacacctgtaatcccaacactttgggaggccgaggtgggcggatcacctgaggccaggagttggagactagtctggccaacatggtgaaaccccgcctctactaaaaagacacaaaaatcagctgggcttggtggcgcatgccttaatcccaactactctggaggctgaggaaggataattcattgaacctggtaggcagagctttcagtgatccgagatcgcaccactgcactccagcctgggagacagagtgaaactccatctcaaaaaaaaaaaaaaaaaaaaaaatcttgacagctcgggagagactgcccattgcagggctaaccaattcatagagatagctaagggtttagacctttcatatacaaatcaaaaaatcctgagcccatatgcccatccacctcctttgctaactcacacacaccaagccagtatttccactgctctaaatcatcctaaggatgagtactagacagctagagactatccctataccccaaagcctgaaaggcttattcagactacccagccctaaagtgtatgctctgtgctgccttgctttcccccgagaaaccccaataaaggttctggcataggttgtcccttccctcctgtttgtgactcctgcccgtgactcctgcccgtgactcctgccctggatgcttcccttggggccccgtgtgtcacggtgtacctccttctcttgggaaatgtaaataatacattcttttttcaatgtcattgacctctttgcgttgacattcacctccacaaattaagattccacaggaacaagtgagacagtgatcttgggtgagtcacttacctggctggttccttttcctctcacaaatcataattttacaccagatggtagatagcagttctagcaccataaaattgtatgattctttttacaaatttacaatttaattacagttcttttgttccagctaaaatatcagctaagggaaaaaatcagataatttttgctgtgaaaagggaaataattggccccaaatgggaccagtcatctgtgtacctttccccgccagggtccaaaggctgcagacagagccaggtctataccctgctggtgctttttaaataagttccataaccatgtctgggctggagagtagtcacaacatgtctccgtcccagagcttgagttaccatggacctggtcacctgggagaaagctcactggactcaccatttgtgaactgggcctgggatccaaggacagcaacaagcatgaggcaggagagggcagccacggagaccttcatcctcctggtgggcaggcagggctggccgaggactcctgggctcactgcttcctggctccccgggataccagctctgcccttgtatttataagaagaggaggatccaggaagtcccagggcagaggtcagaatgctcttctttagctatataatagttaccatgcagtttctaaaaagagaacaaggctgagagtgcaacagaaagtagaggacaaagatgacttgaactgtccctgtggatttcccgaattatcccaatagctacaggcagataaaaaaaaatgtttcaaggaagagtcttccctccaggagattaatctaatcctctaagcctgagataggagtgggggactatcttagactcttggattcaggattgggatgtggtgaatgctgccttttttccctttccagttctattcctgtagttccaaccaggaggtgttagcagtggtgaatccatatcagtctgcagcagcctcagttcttgcctcctcagaagaaataattcaactgaggggtataaggcagagtgagagaccgagacaagatttagagcaggaatgaaagtaaagaacacttggaaaagtgccaagcaggtgactggagagattcaagtgcctggtttgacctttggattggggttttatatgctggcattccgcatgcgcagtggtctgccagcactagggaggggctgcatgcacagtgtgcttactggagttgtacgcatgctcacttgaggcattccttcttgaccagtcaagtgttcctaggtcacataccagttgaactctgccattttgcctcttagtgcacatacttgagcctacttgcctgactcctgagatcttaatgggaaactgttgatcaccagtttgagatatttctatctattgggagactgtctttgctggtgctggctttgaccaattactgttttagagagacagtgtaacaactgcctgaccatcatctgatggttgtctgacattcatggtggggcagggggctctcccgccctgctcatgtctgaataactacctactatgaaacagggattttttttttttttgagacggagttttgctcttgttgcccaggctggagtgcagtggtgcattctcactcactgcaaactccaccttctgggttcaagcgattctcctgcctcagcctcctgagtagatgggattacaggcatgtgccaccacactcagctaattttgtatgtttagtagagacgggggtgttcaccatattagtcaggttggtctcgaactactgacctcaggtgatccacctgcctcggcctcccaaacaaagggacttcaaaggtaagaatgagtcaagctggccacgaaaatggagaactggaaaatctcaagattagaggctagaagaccttcccaggcactgatgatgccacgtcaagttctaaccaccccatcttggaccttcaagtgcctccaaagcctatgataaagggtggccaccagagggaattctctaatctgcgaacttggctgtgatttttcaaacagaatctgccagtggcttctcatggacttgagtcaactccaaggtttgtgtatgagtgtagaaagtccttcagaatagggttctccttatatgcacaactcctctagtttctaatgtaatggcatttaaatgcatattaagtttaaatagtgatgcacctattaatttagattttatacttttttcttttggagttaattttttttttcaggaccccaatactaaatgcctaatgggtaaattggccctgtgcaatactaattcctagcaacccattaactctactcagcagtcagctctgccagaaagacttcttggctgtcgctcccacgaggctgggccaggtgtcccttttcagtgtttctggtacagcatctatctggtacttaaatctacgatagcaccagtcacattctattttaagtgcttatttatttaatggctctcctcattcccccgcccccatacaacaggctgtgtgtgtgtgtgtgtgtgtgtgtgtgagacattaaaaaaaaacatggccaggtacagtggctcatgcctgtaatcccagcacttaagcttgagctcaggagttccagaccatcctaagcaacaaagcgagacctcatttctacaaaaaaaaaaaaacaggcttggtggcacgggcctgcagtcccagttacttgagaggctgaggcaggaggatttcttgtgcttgggcgtgctgcaggctgcagtgacctatgatcacaccactgtactccagcctgggtgacagagtgagaccctgtgtcaaaacaaaacaaatcagccacataacatgagatttacccccttaacaaacttccaagtgtgcagttacaaggtccttgaagaatgtctccaacggtgagatagataccgtacctgctgcacaaaaaccatcgcattgcagtaaagagttattactcagatcaatctcatcgaaggctcacaggttaaaagtttttgaaaggtagtttgggggaggagatgaatgtggctaggcaaagggagcttgctgctgactgcttggggggtgcaatcatagaggtgtgggaaattcacctcctgtaggctgaatggcttctgggtggtgccgcaggagctgttggtgggtccaggtggaaccatcatcagtatctcaatgcaaaaaaaaacctgaaaaggtatctcagaaggccaaacttaggttctacagtagtgatgttatctgcaggagaaattgggaagttgcatatcttgtgacctccacaataatggctggcaatcatttatgtctgcactttcaccttagcaaaattcaggctcctctatcctcctagcctggtagtctctcattagctttacaaaagtggttgagttttggggaagggctaatcatctaaactataaactaaatgtctggcagcttgaaagctaaaggcaagaagagagtgggctagatcagatcttcccattgtcatggttttctcactgttataatttttgcaaagttggtttcattagtataaaacaaatggtgtgagtctgcaagtacaaatgcagaatgatgataatgaaaggaagacaagtattactctcttggttaataagaaaaaaggttgctaaaaaccttagccaaattaaatttaacagagtttaactgagcaaagaacaatttgcgaataaggaagcctcttgagccagagtaggttcatagagactccagcacagccacgtggtagaagatttatagacagaaaaagaaaagtgatcacaggaaatggaagtgaggtacagcaacagctgaatttattacagctgggtgtttaccttattcaaacatggtttgaataggtggtcccctttgactggacaaaactcagtgattggcacgagagtaggttacagcctgtttacacctcgattcaggttacagttcactatgtacagattaggctgaacttaaaataagtgagaaggcagctttaggctaaagttgatttaacaaggtcaattaaaaattgctggaaaataagaatctacatgaggttatcatgggttaaatattaagtaaatgacaatgttgtgtcatctgggcaaatgataaaagacagtttttatttttgttttttaatttttttcttgagctaggtcttgctctgtcacccagactgggatgcagtggcttgatcatagctcactgtaacctccaactcctgggctcaagtgatcctcccacctcagcctcccaaagtactgggattacagatgtgagccaccacacccagccaaaacaccgtttcctaaactgtagttaaaacttcaagattagctcttttagtagggaggatataagatgtaatatgaatttgtgtttactttcttaagggttataataatttcaagcttttatcaccttctcagggcatttttctaacacagttgtgatttagtgttataaaagttatttggttattgatcagttttctcctgttgatttcttagacaaatcacactaaaagtaagcatagagcttaaacttttttttaaataaaaaatgttttgttgtttggaattgtttagaattcagtgctgtcttttgaattttatgagacagttttccaaggtgtactaattatacatataaatttatatactttaatagagatgtatataaaattaatattaactatatctttaaatgtttttcttaatgttctttaagtttagaggcgaaatctcttagaaattgttactgtaggtagctagtcatacataaacagggcaggagaggctcctcccaaccaggaatgtcaggtgaccatcaggtgatggtcaggaggttgttaactgtctctctagaataataattggttgcagccagcaccagggaaaggcaatgtgcctatagatagaaaaaacctgaaaatggtcatcagcatcttcctggtaagatcccaggagttgggcgagtgagctcatgcatgcgcgtcaagaggcaaaatggtggagtttaactcatctaggaccttctgggggcattccatcagtaaagggaagaacacctcaagtgagcatgcgtacagctccagtaaacacactgcatatgctcccctcccaagtagggcattgtgctagtgcttcctaccccaagggaagaatcaggggagaagggacccaagaccccagaagtatgccaacatgtaaaaccctgattcaaaaggtcaaaccccacacctgacctccaaaatgtctgcttggcctgcttccaaacgtactttactttctttttattcctgctctaaatcttctctctctctctcttttttttgagatggagtctcactctgtcacccaggctggagtgtagtggcgtggtctcagctcactgcaacctctgcctcctgggctcaagcaattctcctgtctcagcctcccgagtagcttgggttacaggcacctgccactacacccagctaatttttattagagatggtgtttcaccatgttgaacaggctggtctcaaactcctgacttcaagtgattctcccacctaggcctcacaaagtgctgggattacaggtatgagccaccacgcccggcctgtacagcttcttaataaactttcactcctgctctaacacttgcctcagtctcttctcacttaggcccctcatttgaattctttttcctgaggagggaagaattgaggttgctgcagacctgtacagatttgccacccgtaactcgaataacttcctctgctaactaaatttatatctaataaaaaacttagaaatagataaaagggtccaggcgcagtggctcccacctgtaatcctagcactttgggaggccgaggcgggcggatcacaaggtcaggagtttgagaccagcctggccaacatggtgaaaccctgtctctactaaaaatacgaaaattatctgggcatggcggcatgcgcctgtaatcccagctactagagaggctgaggcaggagaattgcttgaacccgggaggcggaggttgtagtgagctgagactgcaccgctgcactccagcctgggtgacagagcaagactctgtctcaaaaaaaaaaaaaaaaaaaaaaacaggtaaaaggatgactgcatggttttcaaggtcatattacaatgttgactaacaggcccaacccggcattccttaaatctgtaggggaatgaacttttgattgatttctgtttaccattgatcaggccctagattctgagaaagtacatgttaaattttaaacttgtgtgtagccagatgcaaatgatttctgtctattaaaaaagataatcccagaggttacaggtttttttattgccctatccacaggatattaatgtgtgctctaatttaacaaacttatttcagaacgtcatccccagtaaactatacaaatctctgttactcaaatgatctttgaattattttaatagttctctcactaatgagttaaatacatctttgatgcatattcaatctaaattggatgagtaatatttttagttttgtaaaaattgtattatgatgtcccttgttttgaagataatgattatccaaagttcagtaattcctttagtttctttttcctcttaaaattcaagtaaaggctgggcatggtggctcacacctgtaataccagtactttgggaggctgaggcaggaggatcgcttgagcctaagagatcaagaccagcctgggcaacataatcagatcctgtctcttcaacaaataagaattagtggagtatggtggcatgtacctgtagtcccagttgatatggacgggaggcagagaaacactgggtagaagagggcagttccctggcaaatgccccaccctcaagcctgggaacccacgcccctaaattggaacaggcattcctgtttttgcacccaaatgttgccttttccaagactactctggcctgccacgcccctatcctgtgtccatatgacagctaggcctccatgaagggaaagagagcccatattacttttacccaaaggaaagagagaggcggcaggatcttggaaaagagacagatccaatagttctgcctctttacctcttaaaccccaaactccatgagcagaggaacagaacggcagtggcagagaaggagagacgagaaggagcgtctgaatgtcaggagaagttcggctggggacagttgaagaggagatcagccgcgggatggctgaactccaagggaagatcatcttcccactccatccattctccagctccccattcatcccataagagccacatccataactcattaaaatctccacattcaccatcgttcaagtcttcttgaacgatgacctgattcttccaggatgtcagacaaggacctgggtaccaagagggcagggtataaaaggctgtcaccctgactctccactgagacgaagtagccgtctgcagatagcaactgctaaaagagtattaattgtaacacacctttggatgctaccatggggccagagcccaaaagtgcttgccccagctcctgcaccttcccatctgtgtgttccccctcctataaggggtaaagtgtgtgacagtggagcaaatgagccacacccctgtcgcaagtcccgtgagggggtcagggaactctcccatttcatctgggggctcgtctgggatacagcacaaggatgagtacagatttagaactgtcggatctgcctcttttccaagattctgccacctctctttttcctttgggtaaaaggaatattggctctgtttctcttcatggaggtctagctgttgcacgggatggaataaagtcctggggcaacagaagccatcttttgttgctggaaggctccaagactgaactctgtaggccaagaaccccagactttgctgtggtatcttctttcatggcttgaaatggctcctatctcttcttttatagtattaagggctttgctgcaactaccgagatgttactaagtacaaggtatgcttggttcagccatcagatgtgcaattcacaacaatgtagtttctgtttcttcttagaggtgccatccccagccgcaggtgtgcgcagtgcatgagtgactcccctccttctcccttcccctccttttcccctccccgccttctcccctctcctcccagctctgcacatgagctgcacccagtggccacgaggggcgggagaaaaccttggctgccgctggggccctagtgcagctggctggccggtgcctcccactcactgcaccagcagagcctctcctcccatggttgaggggtccttactggtctgaaccaggggcggaatacaataaaggaacccatttgcacagagcaagaagttccttccctcttttttagtagtataagcggtttcctttttcttttctaagtgagagggttcctttccccggcacgctgcttttaatagggaaaataacagaggagcgacccctgctggccaatagctgcaaattcggcagggcccctttgagacttgatctaaacagattcatgcagcccctgaaataccttttttgtctgaaactcaattccagccttcaggttgaggccctagaaaggaaaaccagatctgagggatccaaagcctggcaacaggcacaatgtaaatgggaagggccaattcctgctgactaaaaccttgcttcatgaaaggaggccatgctccatgacatagatgaggcccagggaactcaaaggttgttggcagcaagggaaatagggcataatgtgtaagagtggatactctcacccccccaggcccccctgttaacatgagtaaaagccgcttcagcacccatgggtggcatctgccaaggtcactggtacatggggacaaaaagacagaaaacggggatgcctgctttctctccatcaaaccctgagttatcactaaaagaagggaaggaaatgagggtcacctctatttcttgtctttcagaatgggcgatcagctgtcttcaccacccccagcttatactcctctagagtgtatcctgaaccactgggactgctttgaccctcagactctggaggaaaatggctcatagccctctgcacaaaggtttgggcaaattatgaaggactggcttggcctcaggaagaaaccattcatttcgatatcatccagcagttggagcttttctgtaaacgtgagggcaaatgctctgaggcccatatgtgcaggctttctataccgtgcagggcaatccagaccttagctgacaatgtagaattaatccagaccggtttgccatctcgggagaggctgcaaggggcaatcccagggaaccaaaaaaacaaatcccagaggcatccccagcagaggagccagctccctccagccctgctccgccaggtccaccccatcccccctatccagcttcagtctctcacttgccccctcctagaaattctcaccctagacaagccccagtctcattctttcccctccaacagatgcctggtgaatttaccccataaggtccaggtactcttctctctacagaacttgaagcaaattgagggggatcttggcaagttttcagatgaccctgagagatatatagaggcttttcagaacttaacccaagtatttgagctctcctaggaagacgtcatgttactttgaaccaaaccctgactaacactgagaagcaggccactctgcaagtgacagagagatctggggatgaggtttgtatcatacgtagcacccaggaaagggggtgaatattatccaactggaagagaaggagtatcaatgaatgtccctaaatgggatcccaatgacaagatgggagaatgcaagaggagagtttcaggtgtgcataatagagggcttttgtaggattagaactaagcctctctactatatcaagatatccatgagagaccagggatttaatgaaaatcccactgccttcttggggaggctaagagggacctttgtaaagcataggtctctgtgtcccgattccatcatgggacaactaatcctaaatgataaatgtattactcaggcagcccctgatatcagagggaagttgcagaaatgggccctggcgtcggggagtactttaggagacctcctgaaagaggccaccttggtcttttacagtacagatagggagacacaagaaagaggcagaagctttaagggtcaccatgcaaacccacaaaccccagaattcctaaggtgcatctgttaactcctacagatgtggcaagaacagttatctctcttctaaaatttaaccacacccatgcaagtcttaatttctttcactaaggtgaaacagctcagggtacaatgttgttagtatattacacttcctatttcggtaatctttggtggcaagaacagttatctctcttctaaaatttaaccacacccatacaagtcttaatttctttcaccagggtgaaacagctcagggtacaatgttgtgagtatgttacatttcctatttctgtaatctttggcactagattatttctttgtataatacacgtttaacccatgcatacttaacaccttataaaacttgtttttttctctcaaatttgaggtcatgaaaatccaaatggtcaggcaaccggagccttggatgatgactccctttccccagggatccttagatagacctctgggaggaatctgacttctgttttccccaaaaacaatgtcctctgtcagcaggaagtagctaagataggtcattgtccatattctaatggcaattagatgggcctcttagagggtggaaatgatacagatacaggcaaggaaatactgggtagaagagggcagttccccaacaaaggcccaccctgaagcctggaaatccatggccctaaatgggagcaagcattcccattttcatgcccaaatgttgccttttccaagaccactctggcctgccacacccctatcctgtgcccatataaaccccaagctctacaagcagaggaacagaagagcagcagagtagcaaaatggcatggcagaggagagaagagaaggagcatctgaatgtcaggaggagttcggctgaggacggttggaaagcagataagccggggatggctgaactccaggggaagatcatcttcccactccatcccctttccagctccacatccattcctctgagagccaactccatcactcagtaaaatccccaccttcactatccttcaggttgatgtgacctgattcttcctagatgccagacaaagacggataccaagagagcagaatataaaaggctgtcaccctgactctccactgagtggaatagccatccacgaaaagcaactgctaaagagcactaattgtaacacacccctagatgctaccatggggatggagcccaaaagcgctcgccctggctcctgcacctgcctgtctgcatgttccccctcccacaggggatttgaacgtgcagcagccttgcaaatgagccacaccccgtcacaagtcctgtgaggaagtcagggaactctcctctgttagcccaagtggcgccatcaagtaaacccctgccattttgtacaccctgatcagggaggaaacttccataggggctcaggccatgaaaagcattttgccaagcagatcccaggccacactgcctgactgcaggaaatggctcccttattacatcctgccaggcagctagccacactgccccacctcccctgtccagacctataattgccccagtctgtacgcaggacgggggctccagcactcgctggtgttccccttccacaggtttctctgtccaataaacctatgttgctgtcgagcttccccaccttgtatgtctcttttctctgtcctaacaccctgtttcacagctacttgtggggctgaggtaggtgggttacttgagcccaggagattaggctgcagtgagccaagatgtaccagtgcactccagcctgggtgacagagaccctatcacacaaaaaaagtgagaaactgtttattagatgaattgctctaaatccagaacacaagaataaatgcttcttaaaaaaataattcaggaaggtagttgaggcaagaaagttggtggctggcaacttgtgtcccttcaccttgacaagttcaattcttcctggtcttgatccgtgtgtccagcttcagcattctcatgcaaacctgaacttgcttatcactggggttggcacagaaacgtcgccccttcttggtgaggaagctagggaacaagggggagaaaagttacaaactgaggtgtgtccagcacatggggacagggggccccattctccctgcccctcagatttcccagtcaatatagccagtttttttttcttttttttttcattctctgctgatggcagctcagggccattgtgctcttgagaccccctcagcctgtgggactccctagtgactcatgggagcatccttgggcagacttgtgcctgctttcttcttccttccccacccttttccccctgggagtgtctcatccccgatgccctgcaggatcttcctaaggacacagctgccccatacctggcaggatccagagggtgggccctgatggacaccagtctatcaggtcctccctgcaagatgctacagagtccttctccctcaacacatgtttggtgagcttggcacctacatgacacccggcttggagcactcgctgttcgtttcaaagtaactctccaggagtgaacacgggatgcttcgtggggtgtaggagatgcagcagtcagcactagtagcatggaatcctgcagcatgagaaagggtcatctgaggaccaatctttctcctccagagcactgtggagggtgagaaggcacatggctcagaagagatgtttcctcctccgtgaccagcacttgctggcatctccctgcttcagaccctcatcagagttgagctgtgtgtctgagggcactcagggtgggccagagcaggaccaggaaaatttcccctagaaggggaaggcatctgcagacacctgcaggcatcagagagcaccttctgccccaaaggagcagactcttggggcagccagaggggaacagagaaggcatctatggagggggttcccatagcccgtcctgatcttccttggagatgttcaccaccctcaggaccctctcattctcctcccattctgtaaacagggacaatggatcccatagtgcagacctgcacctgctggctgcttttaaatatatgccgtatctgatcacttactgtccagaagtactggattttccaatggaagctttgacatcatgaactctgtctctgcatctggaagaagcagacaggacagggaaggaaatcactgggcggcagcattgtttcagcatctccacccaccccattgctcatcctcctcctgaggcagaaaggtccctgaagctggaccaccaccacctgtctgggctctaggcctgactcctggcccatttattcctttagggccctgagatttttcagggaccttttgaaaatgtagacatgaaaacactgtgttgactctgaaatactaaaagaaacctcaaaatctaacatggttcagttaatggaatgtctacatgatgtgacacagtctacaagtctctctacacatttctggaatccacagggctctggaaacagagaggtgttcatcagctcatatggtggcacagtatccctttaagtgaagtgcagctattatggtcattatttatcccagttagtagaaatattcatgtgtttgttacaggaggttgctgtgtttgattaaaatactgttcccaggcctcatcagggataagtaccatcaatatatgtttaagttttttactaaatcatttttaaatcgtggttatatatatatatatataacgtaaaatttgccatttgaactattttaagtatacagttcaatagcatcaaatacactcaaataactatgcagttttcacggccgttcattcattttgtgaaactgaaactctgtattcattaaacaacaactcctcatgcttcctccccttaatccctgacaatcactatctgtgtcgtgtctctgtggatttgactaagtacctcatgtgagtggaatcatacactatttgtccttttgtgactggtttatttcacttagcataatgtccttgatgtttatccatgttgtagcatgtgtcagaatctccttacttaaatttttattttttcttacttcaacattcaagggaatctccttactttttgaggccaaatagattccattgtatgtatgaaccacactttgtttatctactaaccttttgatgggcacttagtttgcttctactttttggctaccgtcatcaataatgctgctatgaatatgggtgtataaaaatcaattcatgtacctgctttgaattattttggatatatacccagaaatagaattgctgcatcatatcatattaactttttaaaacctgagaaattctgcattccaaaattcatctagcgccaagtgctttggaaatgggattgtggagctgccttatgcttgttaggcaaatgaaactaagctttaaacatttttcctttcttttaaattttaatccttaaagttagtttatttccacaattgactgtctcacagaataaagctagccttaaaatttggccgggtgcggtggctcacgcctgtaatcccagcactttgggaggccaaggcgggcggatcacttgaggtcaggagtttgagaccagcctggccaacatgttgaaatcccgtctctactaaaaaaaaaaaatacaaaaattagctaggcatggtggcatgtgcctgtaatcgcagctactagggaggctgaggcaggagaatcgtttgaacccaggaggtagaggttgcagtgagccaagatggtgccactgtactccagcctgggccacagaatgagactccaactcaaaataaaataaaatataataaatatttacttttaatataatttaataactattaaatatattttaaatataatgtaataactattaaatagactttttctttttttaaagttaaattaaattaaattttatttgactttaagttctggtatacctgtgctgaacgcgcaggttcattacataggtatacatgtgccatggtggtttgctgtacctatcaacccatcatctagggctgctgcatgcaccaggtatttgtcctaatgctctccctccttttaccctccactccccgataggccccagtgtgtgatgttcccctccctgtgtccatgcattctcagtgttcaactcccacttacgagtgagaacatgtggtgtttggctttctgtttctgtgttagtttgctgaggatgatggtttccggctttatccatgtccctgcaaaggacatgaattcatttctttttatggctgcatagtattccatggtgtatatgtgccacattgtctttatccagtctatcattgatgggcatttgggttggtttcaagtctttgctattgtgattagtgctgcaataaagatacatgtgcatgtgtcttttaatataatatatgtgtacttttcatatatttaaaaataaatatacttttaatataatttaatgactatattaaatatcttttaatataatttaataaggatattaaatatacttttaatataatttaatgactatgcatttaatataatttaacaattatattaaatatactattaataattttaaagctggctttaaagttgatatttacttaacattttgaaacataaagacttggcaataacgattcagctgccgaattagtcccccaattgctttccagtgttttcaacttatttcttatatggttacattaaatgaattatatgtaatgagacatgtgggtatattttaatatgctcaatatggtttgggtaaggtaaaaaaaagatcttaaatggccttgtcgttccataactacttcctaattagctcatattttaattccaccgcttaatagttgtgtgatctaccaagttatctaaggttctgtgcctcagttttctcatttgtaaaatgtcaataataataatatgaaaaaccatataaaagttgatgttttgtttcttccctacaaaagtaaaaaatttgcattttttaaaatctaatacatatcccacagggttgttaggtggaactgatgtgttaatatctgtaagacacttagaacagtgcctgccctgtacataggaagtactagaagtgcatttgttaaacaaaaaaatacgatggttaggtgaccttggttgagtcatttgtgtggcttgttccatttcttctccaaaatgatatgatagatactactagatggtatgtaacagttttagcatcatacaattctatgcttctttctacaaatttgtaattttactacacttcttttaatctagcacttaatagtcctatgtctgctaagggaaggtatcaaataatttttgctgtgaaaagggaaatgattggccccacattggaccagccatatgtgtatattcccctcccagggtccaaagcctgcagacagaaccaggtctatactctggtgctgcttttaaatgagtaccatgaccacgtctgggatggagagtagttacaggagggcaatgtgtctctgccacagagcttgagttaccatgaacctggtcatctgagagaaagctcactggactcaccttttgtgacccgggcctgggatccaagggcagtaacaagcatgaggcaggagagggcagccacggagaccttcatcctcctggtgggcaggcagggctggccgaggactcctgggctcactgcttcctggcttctcgggatgccagttctgcccttgtatttataagaagaagaggaagttacagggcagaggtcagaatgctgttttttgacttatgatagttaacaggctctttctaaaaaggaaacaaggctgagaatgcaataggaagtagacgacaaagatgacttggactgtccttgtggacttcccgagttgttccaataagtacaggcagagagagcaaatactttatgatggatacttccctctgggagattcattcatcctctaaacagtggagttttttttcctcaggagctaaccaccttcagatgctcaaatagcctgtacacatggggaccaccagagagaacacttcaacttgtagagctgtgatctctgctggtaaacacagctcatacgacatcccgtaatgtacagcccatgatgtgtactcacacagcatgattgtctagcataagctgagctactctagaatataatggggagagtgtagggcaaggatgagcacatgggagctaaaatgtcgccttgttggggtagcctgccttccttctcagccctgcgcttagtctctgggaaaggaatagtcctcgtccagtgtctggagatatccttgactcctctgtttatctcataccccatatctaattcattaataagtatttttggccctaattccaaaaatatagccagaatcttattattccttcaaaagaaaactcccatttattctctactactattctcaatgcttcacttctgagactacctggtgttagcatagaccacacaggttaagggctcggtcccgtgaggctggcaacacttcagatgccaatctcaaatagtgggtccccaggttacccacaacttctgtttgacttggctacacatcagaatttcccaagaccccctcctcagattccataattactaaagtagctctcagaactcagaagaacagtttacttacagggttatattataaagcatacaactcaggaacagccaggtcaatgagatgcatagggaaaggcatggggagtgggtttggagcttctgtgtcctctccaggtgtaccatcctctcagtgcctccactgaacactgttccaagttcaccaacctggaaactctctaaaccccattctgttaggtttttatggaagatttattacataagcatgattgattaaatcattaaccattagtaatcagatcaatctccagcctctctcccctccctggagtttaggggtagaggctgaaatttccaatcctttcatggttggctcccatggcaaccagttctcatccctaaggctttccaaaagtcacttcattgacataaactcaggtgtggtaggaactacttgtccagacttccaggttgtacgtgcctgagtaatgagctgatccttcttatacctcagcatcagagaatccccggtgcaggaaaagtggggtgtgcatgatggacaaggtgaggtgctgtcagattataccgtcttgagctgggcagagcctgggtgcaactggctgctgtagtggtggctagagtcagagataaagctgatagaatggaagtggtgtacagaggagcctgacacagtattagatgcatatttttttagtgaaagaatataaggaatagatttcacaatattcaccaatcagtatgttgattacacaacatattgtcatttcttgacagggattgctttcagcttttgctcattcagtatgattttggctgtgggtttgtcataaacagctcttattattttgagatatgttccatcaatgctagtttattgagtgtttttagcatgaagtgttgttgaattttatcgaagaccttttctgcatctattgagataatcatgtggtttttgtcattggttctgtttatgtgatggattacatttattgacttgcatatgttgaatcagccttgcatcccagggatgaagccatggataagctttttaatgtgctgctggatttggtttgccagtattttattgaggatttttgcaatgatgttcatcagggatattggccagaaatttcctttgttgttgttgttgttttgtctttgccaggttttggtatcaggatgatgctggcctcataaaatgagttagggaggagtccctctttttctgttgattggaataatttcagaaggaatggtaccagctcctctttgtacctctggtagaattcggctgtgaatccatctggtcctgtgctttttttggttggtaggctatcaattactgcctcaatttcagaactcgttattggtctattcagggattcaacttcttcctggtttagtcttgggagggtgtatgtgtctaggaatttatccatttcttctagattttctggtttatttgcatagaggtgtttatcgtattctctgatggcagtttgtatttctgtgggatcagtggtgatatcccctttatcattttttattgtgtctatttgattcttctctcttttcttttttattagtctggctagcagtctatctattttgttaatcttttcaaaaaaccagcacctggattcattgattttttgcagggttttttgtgtctctatctccttcagttctgctctgatcttagttatttcttgtcttctgttagctttcgaatttgtttgctcttgcttctctagttcttttaattgtgatgttagggtgtcaattttggatctttcccactttctaatgtggacatttagtgctataaatttccctctaaacactacttttgccgtgtcccagagattctggtacgttgtgtctttgttcccattggtttcaaagaacttatttatttctgccttaactttgttgtttacccagtagtcattcaggagcaggttgttcagtttccatgtagttgtgcagttttgagtgagtttcttaatcctgagttctaatttgattgcactgtggtctgagagactgttatgatttctgttcttttgcacttgctgaggagtgttttacttccaattatgtgttctattttagaataagtgctatgtggtgctgagaagaatgtatattctgtcagggtggagagttctgtagatatttattaggtccgcttggcccagagctgagttcaagtccttaatatccttattaattttctgtcaagttgatctgtctaatattgacagtgaggtgtttaagtcttccactattattgtgtgggagtctatgtctctttgtaggtctctaagaacttgctttataaatctgggtgctcctgttttgggtgcatatatatttaggatagttagctcttcttgttgcagtgatccctttaccattatgtaatgtctttctttgtcattttttatctttgttggtttaaagtctatttatcagagactaggattgcaacccctgcttttctttgctttctatttgcttggtaagtatccctccatccctttattttgagcctatgtgtgtctttgcacgtgagatggatctcctgaatacagcacactgatgggtcttgactcttttatccaatttgccagtctgtgtcttttaattggggcatttagcctgtttacatttaaggctaatattgttatgtgtgaatttgattctgtcattatgttgttagctggttattttgcccattcattgatgcagtttcttcatagtgtcaatcatctttacattttggtatgtttctgcagtgactggtacaggtttttcctttccatatttagtgcttccttcgggacctcttgtaaggcaggctctcttgtctgtaaaggattttatttctccttcacttatgaagcttagtttggctggatatgaaattctgggttgaaaattcttttctttaagaatgttgaattggcccccactctcttctggcttgtagggtttcttcagagagatccactgttagtctgatgggcttccctttgtgggtaaccagacctttctctctggcttcccttaacatttttttcttccatttcaaccttggagaatctgatgattttgtgtcttggggttgctcttctcgaggagtatctttgtggtgttctctgtatttcctgaatttgaatgttggcctgtcttgctaggttggggaagttctcctggcttcctgaagtgtattttccaacttggttccattctccccgtcactttcaggtacacaaatcaaatgtaggtttggtcttttcacatagtcccatatttcttggaggctttgttcattccttttcattcttttttctctaatcttgtcttcatgctttatttcattaaggtgatcttcagtctctgatatcctttcttctgcttgatcaattcggctattgatacttgtgtatgcttcacgaagttctcgtgctgtgtttttcagctctatcagatcatttatgctcttctctaaactggctattctagttagcagttcctgtaaccttttatcaaggttcttagcttccttgcattgggttacaacatgctcctttagcttggaggagtttgttagtacccaccttctgaagcctacttctgtcgattcatcaaactcattctccatccagttttgttcccttgctggcgaggagttgtgatcctttggaggagaagaggcattctggtttttggaattttcagcctttttgcaaaggttttccttcattttcgtggatttatctacctttggtctttgacgttggtgaccttcagatggggtttttgtgtgggcatcttttttgttgatgttgatgctattgctttctgtttgttagttttccttctaacagtcaggccattcttctgcaggtctgctggagtttgctttaggtcccctccagactctgtttgcctgggtatcactgatggaggctgcagaacagcaaagattgctgcctgctccctcctctgaaagcttcatccaagaggggtacccgccagatgccagccggagctctcctgtatgaggtgtctgttgacccctgctaggaggtgtcttccagtcaggaggcatgggggcagggacccacttgaggaggcagtctgtcccttagcagagcttgagtgctgtgctgggagatctgctgctctcttcagagctggcaggcaggaatgtttaagtttgctgaagctgcgcccacagccaccccttcccccaggtgctctgtcctagggagatgggacttttatctgtaagtccctgactgtggctgctgcctttttttcagaaacgccctgcccagagaggaggaatctagagaggcagtctgactgcagcggctttgccgcactgaggtgggttctgcatccagttcgaacttccaggtggctttgtttacactgtgaggggaaactgcctactcaagcctcagtaatggtgggcacccctccccccatcaagcttgcatgtcccaggtagacttcagactgctgtgctggcagcgagaatttcaagccagtggatcttagcttgttgggctcagtgggtgtgggatttgctgagcaagaccacttggctctttggcttcagcctcctttctaggggagcgaactgttctgtcttgctggtgttccaggtgccactggggtacaaaaagactcctgcagcttgctcagtgtctacccaaatggccgcccagttttgtgcttgaaacccagggccctggtggtgtaggcacccgtgagaatctcctggtctgtgggttgcgaagaccatgggaaaagcatagtatctgggccggatagcactgtccctcacagcacagtccctcatggcttcccttggctaggggagggagttccctgaccccttgtgtaatttatacagacctagggggactgaacaaagggggtgaacgtgggaataaaagacaagagacaaaagaatatatttagtcaggggccactttgcctctagtggacaagggccctgagctttacatagccctccatctttattaggcaaaagagatagtgagaagggggttggaagaaggggtcagccgcttggtccagagtaggcttgtaagactgtgttgtgcttccagggtgaggcaatgccccaccctgctcctgctcaccctccatgggctacacccaccgtccaaccagtcccaatgagctgaactgggtacctcagttggaaatgcagaaatcacctgccttctgggttggtctcactgggagctgcagaccagagctgttcctattcaggcatcttgcctgggaatccttgtgcatgatcttaaatggcctattacacgagaaaaactttcttcttaagtgataaggggaataacagagcctgccaactcatcttcttgtttcttgtgtaagactgggcccaggtcctttttagagaaacaaaaccaatccaaacaatgtctccttaaagaggcctgtagctaaagtctgcgctatgccatgcaattgaaactgctctagggttgcacagagatggagtcccttaaatatcttctgaccattcctgtataccagccactgtatgtgtatttggtgataccaagtcaaatgaattggtttcagttttgcgccaaatgtttctcctaactcacactggttatctgaaattagatcttggtttaaatatttaactaattccttcctttgatagactgtttgcaaaaatgggtgcagtaattcctaccacccagtgtgcctacccttgggaagtcccttcgcctactgaatctggtctttgctatgtgactgtctttggacaatgagacaatagaaaatgtgatgaaaacagaggccggaaaagtgctggtgcattgatacttgcattattaatatttcactgctgagaacttttataccaccgcatgtgccagcctatgctagcctaccaaaggaggagagaccacaaggagagaaaggtccccagacatcccagctgtcccagctgagaggttatcctaggccttcaaaccctggctgagctggctcagaccgggagaactacccctccaacctacagaattgtgagaatagctgtttgctgttttaagtcactacattttgtggtgatttatgatgtagcaaaagctaactgataatcctccttttgggccataaggatagatttatcttttttataaatttgctgaacgcaaaagtaatagttccttattcaagaggaggcttgttgctttatttttaaaatttttttgaaacaggttcttcctttgttcaccagggtggagtgcagtggcacaatcacggctcactgcagccttgacctcccaggctcaagtggtcctcccaccttagcctcccaagtggcccgtactgcaggcatgcaccaccatgcttggctaacttaaaaatttttttttttagaaatggggtcctgctatgttgcccccggctggttttgaactcctgggctgaagtgatcctcccacctccacctcccaaagtgctaggataacaggtgtgagccactgtgcccggctgaggcttgttgcttttaattaaactaggtacttgttagagaaggactacataaatcttagtaaagatgctttattctagttagggtagagatagaggattgaggaagtttctgccatccagagctgtggagcctttgtgcccattggagatttcaagggaggtccagatgcatccctttggactgggatgaagagaaacatttctgaaagggatagcatttgatgcaggtctcagaaataggacagagactgtatactgcttcaaaaggcagggaagggaggaagaagatcctagtcagctgtaactgccaataaggatagtaaatagttgcaatgagatatgggctacttactgttttatgttttacaattattatataattaaatcttaactacaatcttgtgaaataggcacagtcattagctctttttccagatgaggctatggagacatacagcaatagagtaatttgctaatatttgctatatgcccacatgggtagtaaagggcaaagctggcatttgaaccaaggtctctctaatactagacctcactatttaagacaaaggcatggacatgatcaaattgaggcacattttggatgtgtctatagtatacaaataatgtacacataagcatgatcattaatgtttttaaattggacttttttattttgaggtaattgtagattcacatgcaattgtaagaaataatacagagagatcctgggtagtgtactctttacacagtgtaaaagttgaccatacaattgggtcattcttgtcatacccaactaaaacagagttgagatgccagggggagaaaacactgagggcatataacattggtctaggccgggcacagtggcccacgcctgtaatcccagcactttgggaggccaaggagggtggatcacgaggtcaggaatttcagaccagcccaatagacatggtgaaaccccgtctctactaaaaatacaaaaattagctgggcatggtggcgggtacctgtaatcccagctactcaggaggctgaggcaggagaactgcttgaatctgggaggcggaggttgcagtgagccgagatcacgccactgcactccagcctgagcgacagagcgagactgtctcaaaaaaaaaaaaacaaaaacaaaaacaaaaaaccaacactggtctaataatgtaattctctgcatgcaagcctgtctgggacatataacattgctccaagaatgtagtcctctgcaagcctggctgctgaagtttcagcctgtgctatcctgaaacccattttatctaatagttactgaaacaacctgctgtggttctaagactagtcttacccactgctatcactcaccaatcacaacttgccagtttcctaaaactttactagtgccaatgaactttcttgcaaaacaatatgtaacttttctctttttaataaaacctctagcttactctttggtctttggacatactaaagactacccagacagtatgtatgtcttgaattgtaattcttgcgtcccaaataagacattttaaatttagagattcatctctatattttgtttgactttgacaccagtttctcccaaaagtgacatgttgcaaaacgatagtacaatatagtagaggatattgacattgatatcatcaatatacagaaaagttccttcaccacaaggctccctcatgtaacccttgtatagctacacttatctccctcccacccatcccaccccttcctcaattcttggcaaccacgaatctgttctccatgtttataatcttgtcattttatgaatgttatgtaaatggaatcatatggtatgtcacctcttgggattggctttattcactcagctgaattctctggagattcattcaggttgttgcatgtgccaatagttcattctttttattgctgaatagtattccatgatatggttgaaccacagtttgtttaatcatttatccactgaaggacatctgggtgtttccagttttgggctattataaataatgctgcaataaacattcatgtactgctttgtttatgtgaatgtaagtcttcattctccaggataaatgctcaagggtacgattaacatttagcatggctatcaatactttaagacaagttctgtgatcaagtattttctttttaagtaaagtagggggcatgtgtttgtttttttcagcaccttcctttcttctggaaagatgccctcttcttggaggaactgcccatgtagctattaggttctgtgaggctcttgcccatcacggtacctcctcctttgcaatagatgtgcacctacctccccagtcagacaactggggtccttcccagggatttttcagattttaatgacagaaaagcagcagctccttcaggaagtggaggtcctgtggtctgccttcagaagagcaatgccattgataccaggatcctgtggaactgcatgccctggggctggttttccctgagctgtacgcctgccatccactctgaatttatgagctaataaactatttctggttttgctcgaggaaattttgagagagctttctgtcacataagactcaaagtataaagaatctttcattccccactcctgggctctttctggcttcgtgctcatggttctgactctcctctccttcagttctgaggtcccaactgtcagggcccaaagaaaccgctcaagttcttgctgtgtccagcacaattttcatggaacagcccttggtgttttctccaaggctctgataccaaatctacactgagacctggagcctatggcttccttgggcccccagagggctgggagtcataatttggcacaatgagtgagagctgagagaaagtgggcctgggattaaatcctgggcagagaaattcccaagggctggcagaggtgaggggatggggtaggagccttgggctctgctcctgctgcatcctgaactgggatacctcaactgcagtgtggcgactgtgctgtgagctctagatcacggctggcatcatgggcgtgtgacctgtgcaattacacaggtccttgctcttggtttcaggctctgctgccgttgttgtttaggagttagtagttttttaacaaggggcctaacactttcatttttcactgggtcttgtgtagtcatggcttcaggcactgtggagttgtcactaatgtactgcaccctttggatgatgaagatgaggcacaagaggctgaggagttgagactctgtacaagttcctaccttccccatggaatcctggagacttctggctttgggcaagtctcctttccgaggggttgctccctattccccaggaccctatacacacctgagccagtgtcctccacggtgattcatgcgatcctttcaggcagttccctctttcttcttctttgtcccagacttggcccctctctacccactgggaccacctcctccatctctttgaaggctcagcccaggccaaaaggtgctcagcttctctctgtgtctgcacacctgataggtgtccagaagtcttcctctcccttgggaagtacccagccttcctcctcttttcaggccctgctagcttttttcacccctgaggtcagcagttggaacccaagttccccaaggtcagtggttggagcccaagtttgcctgactctaaagcctgtgattgtcttattatatcttgctcttcttgttacaacagtgattattttaacaatcattatcatttattaagtgcttactatgggcaggtcaggaccagatggtggtaaatgaggcactagccttgcgcttgtgttgaaaacccaaggggacaccaaaaagttcagtagtaaaaataagtaatattttagtgaactatttaaaaaatcaaaattactactgaaaaaatcacaatgaacaaaacacaaaaacacttaaataaagacaggatcggtaacagtgctgtgccgagccatattggaacttgaggaaaaaggtaaaatcaatgggagcttcctgttagaatatccacccatccatctgtccattcatcaatatgtccatccatctatccatacatctgtccatccatccatccatctcccatccatccatccatccatctgtccctctgtccatctgttcatccacccatccacctctcatccatccatctgtccatccatccatccatccatccatccatccatccgtccatccatttaatataaatttactgagcatctaccacgtgctgggcattctgctcagcaccaagagtatcacacaaagagccaaaaagattatgttcctttcctcctggagacaaaattaaataatcacacaaataaacatgtacttatacactgtgataagcaacaccatggaaaagaatatattgggggcccagagaatgcctctctgagaaagtagcatttaagctgagaattataaaatgagcaatgtttgctaagttgacaagtgaggaaaagggagacaaaggtaagggaagtagtttgtgcaaaagtcttgaggcaggaggtactagcacatatcagggactggttggtattagttgagagcaactagaaaaatcatgggtcctgccttgagttttatacaagggcagaggaagaaccagccctcaaaattaaagacacaacgggagaccaaaatgaaagctgctatatagtttccccccaaagttgtcctcgttcaagctatcagtgacacatacgcaggggctgttgatttatgcctatcatgaggcatctgcctctcttcctgggagtgtgagactcatgccaaaagcttagcggtggtctgcagtggcctcatctagggctgctcctgggaatgcactggaaagagaagcccccttcgaggcttctctgggttcatttcctttaaatccaaagcccttctttgggttcatttcctttaaagcatggccaggtcagcttcaggctataagatatgatgaagtttctcttcaaatagcctaatcaatcctttattctttaatagtacctccccacccctttttcctttttgtctttttttcttcctttctgcctttgttacatgcccagacacgccacaataccaggtgttagcagtaccagctcacattcctttccttattaaaaaaaaaaagactaactctctagctcattacagacaccccttcccctttcccctctctctcttacatgcccaccttatctgaaacaaaaaagttcaaatatttagccaaacagaattagtttaaagcgtacaacccaatcctggccaatgaaaaaaaaaaatacaaaagcaagacttgcgtcagaaataaaggctttcatgcccctttattcaagtgtgctcccatggcgactggccaaggagaaacacccctctgcgcaaaagtaaaattgctttgctaaaaatcctttgtttaagtgttcaatttccttagaattttaaatattattcccaaaaaggccttagcatcatcttaagcagtcacaaacagacctgtcaaattcctaccaaccttttctttcctcttcttttctttgccctgacatttcctgtatttgggcctctgaagattcaaagaatagagtccctaacttacccagcccatccctgccttgagttggtctttgaccctttaataactgcgcccttccatttaaaagtaaaatatttccttgttaagaagacatgtggttggattattgcttctgcttttcacaaagccatagagtaaaagccaagcctcaggatctggagaggagggatgaggttgaattttatgatctatacttctctcttggcagccaggcaggatttgagggagcaggaccctgttagagatgaggcaacccagggagctggaaagaatatggtgactgcctggacacatggaaaggaatactgcataggctctgccactgggttaactgtagttgggattgaaatttacaaaatagccctgagtgtctgccataccaggcaatgagggacagaggacaagtgagcagcatccctctgccccctgcactcatgcgtccatcaataagttggttctttctaaagaatatctgcaatctgttgcctcctctccattctcagtgcccctgccttagttcagtcttttacctggactattgcaatggtctcctaattggtccccctgcttcccttcttgctcccctcaaacccgttctctgtcctgaagccagagtactctttctaaaacccaaatcaggccatgcccatctactgacaacctttggcttacaaggctctgacaggtctactgttctcgctgaacttccagtcccactggccttcttttcattaggcaaacacaatcaccccagggcctttgccttttctggtttctctgcctggatgctttcctacctctggcttgttttatggctgaatcttcctcatcttgtagggctcagattaattgtcaccttcttagagaggcctcctctgacctttcctaaagaacccacacaccatagcctgttttaggtctttcaaagcattggttaccattggaaattactttgtatacttgttcgcttgaggatcatttccccctttcccattccaccccctagaatgtaagctcctgagggctgggatggtacatgtctaggttaccccagtatctggcactgggagcagtgcccaataaatgtggaatgagggtgtcacaggctgtggtgtgtcagaggaggtggagatgggccactttggtctgggaggatcggagaagatgtagcatttgacagaaatcttgaaaagcagacagagaaagcaggagagagaaagcagaagagaaagtggagtttgcaaactccatggatagaaagaaccatgagagacaaatgcctagaagtaagaaatccatatttgggtttgcggtttggccatacaatctaactttcaaggagcagatctatatctaatatgctgcatattatttcaaggccacccaaagtccatatataggggccctagtccccacctcatgggtccttctaagctttttgcttcacgtgccaactccctcctctccagcctgacttgctggagtccagtgatccagctgggtccaatacagctttcttccaatatccttctttactttctccaaagctcaagtaacatgttcacaagtcaatgtctaatattgctaccaacagctcactgggtccctgagcctccacataccccaaagagggtgtcagagccaagcttcagaatagaatggaattcagcacagtggaggagatcaggaaaaaactgtcattggggattaatctcagggcaggacagctaccatgcagtggcgggggctgtgggattagcggttggccatgactagatcctttctctccatgctcagagtgtttcagctcatccaattaaccctgaactaatgtttacctcaaacccaagcaggcgagacatttacttgtgtctaaattatgagtcaaggggtagaaggatcaaaaatggaggaatgcaaaagctgaggagggatcatcccatctttcttccattctctggtaaatttgggggcttttgtctccttcccgaaggatgagctccaaccagggtcagagcaagacctgagtggtcctaggctctaaaaaggttattctgtgtttcagcatgtaatttcaaatacccaatactaactgaaaagtaatgataagactgtataagggacttttgatttttttaaataatagccactttgatcactgtgtacatgcatgaagttgcaaatattgtattctttcaaaagcattatttgttgatttcctaagcacctgccggttgcctattgggcaatgcagcactgattccattcacttggactcccaagtccaccccaccccacttctagcagcctcctttcagccttctccttcccttccccaccatgctgctccatttactgggaactgcttccacctggaagactccagcccaggccagaaagcccccaggctggccctctactgcctctccctgtgtctgcaacacctggcaggtgctctgacggttggtgcttctctcaacagtctccatcccactgagtctgattaatggagtgagactcacagggtggtgggtttgggacacacttcatgaattagacagataataatgtatcacatacttgcatgggatcctccaggtgatgtagcagcacttactgatgttgtcattcatatctggaaagaagcaggtggaagtagggctaagccatgctctaggagactcagacatgctactccgtgcaccaagaatgggaggcaatgcctttcactcagacaagaaacacacctaaagccaaaatactaaattacctacagccactggaatctgccatttctcttgtgtaagttgttcatcatcattgaataataaacccactcacactttatccctaccaggaacctcactctcgcttgaccaaatccactatccttttttttgtgtaggagaaaaaataaggatctttatttgtgaaggagttaagaatatgccgcccaaaattcactgttctggcatattttaaattaaaggcatgtaaaaaaagaacccagcaggtgcaagaagatccttctttattttgacctttattgtctttatcaaaggcaggaaatgaaatgcccatgtgaaagatgtcctccttataccgaaagaaaaataatattcttattaaggatgggaagctgaagccgagagaagtctacacaaacaaaccttatcaccttagtcatttctgtacccaattaatcacccagcgcagcccctttgccttatcacatttcacaacttcctattttttgtccaattcagtgtataagtaactgaccctaactgcttctttgagtttctgttccttatgagggatcttgtgtcatgtaaaacttgtattaactaaatttgtgtacttttctcctattaatctatcatatgtcaatttaattcttgagtccaggtgggatcttaagaaaatggagatggatttttgcctctcctaagtttggtaggtgctttctatataatgtgttatttaattctcccctaaactctaagaggttgatgttcttgttccattaggaacataaacttggcaagccttggtaaggttaaggaacttgttggcgttaacccattgttaagtggctgagacctgaaaccgggatgtcaattccaagtcccaagacttaacttcttcaccaacattactaactcgtttggctgcaagtgtcatttaccctctgaatgagtttccacacctgtgaagaggagattgatgctttctctctggcagggtagttgtgagattagaaataatgtatgtaaagcacaaacctggcatgactaccatttttattaagcatttattctgtgccaggtggtgttctatgagcttaaatgtatgtattaattaatttaaccatcacaacaaacttgcattgtagatgttattatcatctccattttatagagaagcaaaccaaggcatagagaaattaggtaacctgtgaaagccacatgggagaataagtgatagctattattttcaaaattgtgatttcccatgcatcaagccctttctttgtccttccttgagagcctctctccttaatttaagctaccagggaaggagcagcccaagaactagcccattctggctcttgcttttttcacgggaggttttactttgctttttttttttttttttttttttttttaggtagggccttgttctgtcattcaggctggagtgcagtggcacaattatggctcactccagcctagaccacctgggctcaagcaatcctcccacctcagcctcctgagtagctgagactacaggagtgcaccagtatgtctggctaatttttaaaattttgtagtagagatgaggtgttactatgtttcccaggctggttgtgaactcctaggctcgagtgatcctcctgcctcggcctcccaaagtgctgggattacaggcataagccaccacgcccagacctgttccaccttgattattctgtttctagcccagtctcagggcaccctcatgaatctcacatagagttaatgtttagaaattacccgatattgaattacaactttatgactccaaatattgattttgaagataataaaactgtttaagttacaataatgatgaggaaataattttttcaggtcataaagaatcttttgtttttatggtaactttttattttaaaataactttacactgacatagaaattgcagaaatagtacataaagtttctgtgcaatcttgactcagcttcccccaatgggaagcttataaaacttcatatacaaccgtataaaaaatgcattatgatcatcaaaactagaaaattgacagttctacaatatcattatcattattattttttgagacagagtcttgctctgtcacccaggctggagtgcagtggcaccatcttggctcactgcaacctccgtctcctgggttcaagtgattcttctgcttcagcctcctgagtagctgggattacaggtgctcaccgccatgcttggctaatttttgtatttttagtagatatggggtttctccatgttgaccaggctggtcttgaacccctgacctcaagtgatccgcctgcctcagcctcccaaagtgctgggattacaggcatgagccactgcgcccaaccagccatcgtgcccggcctctacaatattatcaacaaaacagatcttattaaaattttaccaatttttacatgcagtcatttttcgttggtgtatagttgaatcatatgatcccttgggtgtctatgccaacttctggcctcccacatctaagttactgaatcatctgcctcccatgttttggtaaataacattcaccctcctcccagagctgcggtcttgcttgactggccccacttcccctattcaaaggagaaaggctggagttgcagaaggaggcatggggagaattatggctttattttttattagactattcttattttagtaaagttgtttttgcacactggctcatgcagcagtgtatatagttatgtgccacataatgatgtttttatcaatgacagactacatatatgacacttaacaacatgcatatgttctgagaaatgctttgttaggcaatttcatcattatacagacatcatgtacttacacaaacctagatggtgtagcctactacacatcttattataagattataataccataatttgttcagcagcaatacattaaacaaaaattatgctaccttatttttactgtaccttttctatgtttaggtatgtttaggtacacaaatactcaccactgtgttacaactgcctacagtattctgtacagtagcatgctgcacaggtttgtagcctaggagcaattgctgtaccatataggtgtgtggcaggctccaccatctaggtttgtgtaagtatgtgatgtctgtacaatgaaattgtctaatgaagcatttctcaaaacctatgcccatcgttaagcaacatacgactgtatctgtttcctgaatttaattgtttccccggctgattccagagtattttctattgaccattgactatgaggccctctgtctacacccttccccagatgttcattgcttccagagaaggaaatggggttggtccagcttgattcggcctaactgcaccatgctgacttgcagtgactacttcctttctgaagtgccaacaagaggttttttaaaataagaattataggccgggcatggtggctcacacctgtaatcccagcactttgggaggccgaggcaggcggatcacgaggtcaggaaatcaagaccatcctggctaacagagtgaaaccccgtctctattaaaaatacaaaaaaattagctgggcatggtggcgggcgcctatagtcccagctactggggaggctgaggcaggagaatggcgtgaacccgggaggcggagcttgcagtgagccgagatcgcaccactgcactccagcctgggcgacagagtgagactccgtttcaaaaaaaaaaaaaaaaaaagaattgtataggtatatgtagaatcttgactagtctagaggcagctgaccactctgaagttgatggagtctatcgtctattttctttctccctccttttttggaaagctgggtgctattttctcatcttcaatattccacaacctgtctgcctcccaagaatctgcaaagatcatcaatctctaccatgtgttttctcagctgatagagaggacttcatccaagtcaagggactgagaagccacccatcttgggcttcgatttcttcgtatctttgggaattatccccattctagcctataatggacagagaatgaatgaataaaaattggagaccacatgttctgctttatcccttccatctgttcagttaacactctttattcatttactcattcatttattctgtaaatatgtattgaatacataccatgagcagagcactggagattcagctgcaaacaagatgcatagggccttctgtgagtttaagcaaacagtaagcctctggcaccttcttcctaaagtaaaacaaagcaaacacttttaccatcattcactattaaaaaagcaacactatggaaaaattttgaaaatatttaagcaaaaagaagtcagcaaaaatcccctgtgatcccacaataacattcttagatgtgtcttcatcttttttccctgtttgctttctccctacgtgggatcataccaaaaaaagtcatattccatgttttcacaagttgtgtacaatttcaatttcattgtaaaattcttatatgcaatttaaaataatttttaacaaaaaagatgcctgctttttaacagaatttttaagaaaatcaaataaatgaaaaaaatctctttactatcaatattttgatgtgtaagtttcaagtcatgtttttgtatgtagtcattatgtataatacagatatacagttaaacaaaaatgaggtaataataactgttcttttctacagcctgatttttacaggttttttttttttgagacggagtttcactcttgttgcccaggctggagtgcaatggcgcgatcttggctcaccacaacctccgcctaccgggttcaagtgattctcctgcctcagcttcctgagtagctgggattacaggcatgcatcaccacacctggctaattttgtatttttagtagagacggggtttcttcatgttggtcaggctggtctcgaactctcgacctcaggtcatccgccctcctcggcctcccaaagtgctgggattacaggtgtgagccactgcgtctggctagcttttttttttaattattttttttgagatggagtttcgctcttgttgcccaggctggagtgcaatggcacgatctcggctcactgcaatctctgcctcctgggttcaagtgattcccctgcctcagcctcccgaggagctgggattacaggcatctcacaccacgcctgctaatttttatatttttagtagagatagggtttcaccatgttggccaggctgctctcaaatccctgacctcaggtgatctgcccaccttggcctcccaaagtgctgagattataggtgtgagccaccatgcctcgcccatagttttatttatatatttgtttatatatatatataaatattatttatatatttgtttatatatatataaatattatttatatatttgtttatatatatataaatattgtttatatatatatttatatataatatatatttttatttatatattatatataaatatatatagaatatatatataatatttatttatatataatatatatgtattttaaattatatataatatatattttgatattaactaggcataaaatatggactgagaataaagagtagcaatacaacaagcatccctgtacccgatgcctgggatggtccctgagtggtcatttccacagagtgatctctctcctgaataatgtttataatatactcttgcctttctgatcatttcaccatatagatttgaatattaatatatttaactttgtatgtttttaaacttcatttcatttttttgagacaggatctcactctgtcacccaggccgagggcagtggcacgatcatggctcactgcagcctcgacctccctgaaatcaagagatcctcccacctcatcctcgcaagtagctgggactacaagtatgtgccaccatgcctggctggtttttgtattatttttgtagagatgggttttcatcatgttgtccaggctggtcttgaactcctgggctcaagcgattcgcccacctcggcctcccaacgtgttcgaactgcaggtgtgagccactgctctgggctgttttcaaacttacataaatggaattattatatgttttattccatagctttttttccctctcaacattatgctcctgagattcacactatttactatatgtagctgtaatgtgcttgctttcgttcctggtaatattttggtttatgaacataccgtgatttattttccatttgccccttttatttttgctagtgccaacagcactgattggagtattcttgtgtatgtttcctgctgtgaacgtgcaagggtaactgtggctctctctaggagtgtgactgctaggtcatcggccatgcacacctttgctgcaacaagatgacaatggtattttccaaggtgggaggacaaattcacactccctgcagcagtgtgtgcatgtcagttgctccacatcttcactaatatgaatacttttcaaactagtgtttattaaatttggagctagagagacagggagacaaggagacagggagggaggaagttaggaagggaggaagtgaggaagcaaggaagaaagaaagagaggaatattttattctttcaaagcctgaacccagcactggctactcatagtcaataaatatgtgctggtttgatgaatttcttacaatgtctgcctagatagctcattgcagccatgaaatggagtcaatccctttgtgactgaaggggaaaggtggagggagacaagagaaggccatctgacttcccagaacatttagtaaacaacacaattcacaatcaaaaagggattataagtaaaatagcatacgtacatttaaaatgaagttagacccccagatctggaatcagtttctgaggttgcagagacttttgcctgttttgggtccctgtgcccaatctgttcacatctctagcacttttcttgctgggtccagaccttgccggggtttaattccagttgctgatgtattcctggacccacaccttgctggagttggcatagacctttccagtctcctctgtggaggaagcaatggtaagagagagaagtgaataaagaagagacaatcctgcagcagaatgcctgtaacctccccatgtttctctaccctggggatctcagagacagtttattttcagagccaggagcatcccgcaaatcccaagacctagacgatgatgatgatgatgatgatgatgatgatgatgatgatgatgatgatattattatttttgagaaggagtcttgctctgtcgcccaggctggagtgcagtggcgctatctcggctcactgcaagctctgcctcccgggttcacgccattctgtctcagcctccggggtagctgggactacaggcgcccgccaccatgtccggctaattttttgtatttttttagtagagacggggtttcaccgtgttagccaggatggtctcgatctcctgacctcgtgatccgcccgcctcggcctcccaaagtgctgggattacaggcgtgagccaccgcgcccagccccaagacctagattttttaaaaaattgttcatgagtttcttctcgggttgacttccctctgctatcctttcctttcctcttctctgcatgaaggtggctcttccttggctccctacaggctgtgggtccatgcagaaaacaccacagggacctatccctatgtcctgcatgtctaatgagttcctggaggtctgggtgtcccaggttccccctccatctcttgagtcttgggggctgtgtgtccctccatgtctctcccctacgagtggcaagagggctacacctacatgctgagagcatccactgctggtctctaatgcaaatttgtgaataacctactggaaaatgtttgagaagcagcaagagtttattaattttatcaatctttccaatgactcattttgactttgatgattttctttttcttagtctgttttctgtttcagtgaataacaatcttattattttctttcttctgtttcctttgggttcagtttcctcaactcttcctagcttcttaaggtggaagcttcattcttttattttacacctttcttctttttgaatagaagcattgaacgctacagattctcttctaagtgctgcttcagcttcataatgccgtagtttttcatgtgacaggttttcatcattcagttattttctaatttcccttgtgatttcatctttgtcccacagattatttagaattacattctttatttgcaaatatttgggggggggttaaatatcttcttgttattgatttctaatcaaattccattatagtcagagaatatactcggtattattttgattcttgaacatttactgagacttgtttcttgggccagcatacagtgtgtcttggtgaattttccatgtgtatatgaaaaagtatgtatttttcacttgttggatgtaataacctataaatgtcggttaggtccatttggttcattgtgttaagatttacatatccttattgatttctgtttatttagcagttactaagagttgggtactaaaatctccagatatgattgggaagtttttgtttctccctttagttctttcaatatttgcttcatgtattttgaagttcttatactcattaagactcatatcttctcgatgagttgatccttttattaggaaatctctctcttcttctttagtaatattctttttcttgaggtatacttcgtctgatattaatacaattttctgatgcttaccatttgcatggtgtacctttttctttctttctttctttctttttgtttttttttttttttttgagacagaatctcgctctgtcccccaggctggagtgtagtggcgtgatctccgctcactgcaagctccatcacccgggttcacgccattctcctgcctcaacctcccgagtagctgggactacaggtgcccgccaccacacctggctaattttttatatttttagtagagacagggtttcaccgtgttagccaggatggtctcgatctcctgacctcatgatccacttgcctctgcctcccaaaatgctgggattacaggcgtgagccgccatgcctggcctggtgtacattttccaatccttttcttttcaacctttgtgtgtctttagatttaaaattcgttttttaataaacaaaatatagttgggtcttgctttttttgaaaactagtctggtgagattaatccagtcatgtttaatgtaattattgatacggttgggtttaactctaacattttggcatataagatgtatgtatatgtgtgtatatatctttattgaggtatataattgacacaaaataaactgcctaaatttagagagtataatttgataagctttaccatatgtgtatacctgtgagaccatctctgcaatcaaaataatgaacatggccatgaccctagagagtttcctcatgcccgtttataattcctgtcttctaccaactcctcctgagtgaacaactgatctactttctgtcactgtagattattttgcatttcccagaaatttatataaatgggatcccacagtacatattttttttgatctggcttcttgtacttagcatgattattttgagatttttctatatttttgcctttaaaattttactttatttgttccttttcttttcttatttttttgtgactcaaatatcttttagtatctctttttattttttgcttgattttatactaccttataaataataagaggctcttaccacagtattcaacaattttccccatcccatgatttgcacttttgtcttataaaccaaaataacactaatgctatttttgctgaaatggttgatattattatataatattattattttatgtaaagatgctaaaatagaatctttaatatttacctagatatttccttttcttagttctctttattacttttgcatgtcttacattctatctgatattatttcccttcggacttaagaccttcttttaacagtatttgtggtctaaaaatgtctttattctgtcttcatttttttttttttttttgagacagggtctccttctgtcacccaggctaaagtgcagtggcatgttcaagacttattgcagccttgaactcctgggcttctagtcatctctccacctcagcctcccaaatagctgggaccacaggcatgcaccaccatgcccagctaattttaatttttttgtagagacgtagtctccctaggttgcccaggctggtcttaaactcaagcaatccactcacctcaaactcctgaagtattgggattacaggagtaagccactatgcccagcccctaccttcatttttgaaggctattttagttggacatagaaattctaacttgactttaaagatgttctcttgtctctgctcccatcatttgtggtgaaatgtcagacatcatttgtattattgtttccctatatgtaatgtatcttttctctctggctacttttaaggtttactctttttctttccttttcagccattgcttatgttgtgcctaactgtcattttatttgatttatcttgctcgaggtttccaaggttttgggatctgtagtctgatgtatgtcttttgtcaattatgatttccaatatttttttctttccattctctcactcctctctgcctagtattctaagtacatgtatggtactttattttatattttcctatgtgtcttggatgtgctcttttttattttcagcatgtttttgtgtgtgattcactttagagtctttctattgaaccatcttcaagtctaccaatttttttctctgcccggtctcgtctgctgttagcctagctaatgcaaccatttatcagatattattttgcatttccagctttccttttttgggttcttttgaaagatttcagtgtctgcggtgaaattctcatcccttcgttcacattggccacctgttctaccaaatcttttatcatttttaccatatatatatatatattttaaagtccccattcgatcattttaacatccaggacatctctgtctctgcttctattagctatttcttctcctgatcacaggttacattttcttatttctttgcatgtctcataatttattgtattgggcattttatatataaaaacaattaggattgaagcaaataatacacccaaaataggcatacctcttcttttaggctgctagagtaagggactgattcagtctaatctgtagttgagctaaatctgggctttagtttgactcaatttgcactgggctttaaacgttttgaggacaggctcaagactttcccttcagcagggcttgggacctgagtattagcaagattcttaagatctctttgtgttgccagatttctgaaccataggaaattaaaaaaaatttactgtctatttgcccatcagggtcactggtaatttctctttatagtcctgttcctagctttctgcacctcaagagattttgctttgcttttaccacggattttggaaggcagctactttaaatttttcaaagggctggaatgcccccagagggatttctttaaactctcctgcacctgacttcagtagctgaaggcccaagtgttccagaatgattcctcttagctttcctgtcccctattttcagtagcctagagtgccttggatggatttatctcagatttcctgccatgccctctaccttcagtagctgaaaatttggtgaaccttgaatagacaaaactcctttctattttctgttccctgcctctggaatgtagttgttttgaacttagtggaggcccaacacaactcaagggtttctctctcagctctgttgcccccagcccttagtatgctaatgatgctcttggtggggacttgtaggaaagagttggcagatgggtacagtcttgctctgcatttggggctccttggaattctaatctgtcatgttaactcagacatagctattgaaagttaaagttcagtgcatcactttttggagtttagttcaatttgctttacccaccccccggcccatatctgcagtcctctgattttgtgtgtgtgtgtgtgtgtgtgtgtgtgtgtgtgtgtgtgttgggggagtggcagggagtcaggtttattgacatataatttaaatacagatatagttaatcatttttatgtatacaacttgatgagttttgacagatggacagtcatgtaaccaccactaccatcaaaattgataacattcccatcactccataaagtccctttgtgttccttttgtagtcactttctcctatccccagtccttggaaaccagatctgacttttgtctctatagttttgccttatacattctattatgtaaatggaataatactgtttgtagctttttcccagtctggactcatttgtttatcattctgcttttgagatttatccatacttttgtatgtattagatcattctcacgttgttatcaagaaatatcagacactaggtaatttataaggaaaagaggtttaattggctcatggttctgcaggctatacaggtagcatgaagctggtatctacttggcttctggggaggcttcaggaaacttacaatcattgtggaaggtgagaggagatcaggcatatcacagggccagagcaggagcaagagagagaggggggaagtgctacacagttttaaatgactagatctcatgataattaactcactattgtgaggaaagtatcaaagagaataatgctaaatcattcatgagaaatctgcacccatgatccaaccacctcccaccaggccccaggtccaacactagggatcacatttcaatatgagatttggttgaagacacacattcaaaacatatcattgtatgtatcagtagttgggtcctttttcttgctgagtagtactccattgtatagatgtatagtcagttctgctatcatgcatatttataaaatgcaaattattttcaatttaatttaaaaaaaaaggctgactaggaatgttggatgcgagttcttttcagaaagaagatcgaagttacctgttaatggtcatgatccaaatggaaaactgagggaagacagccaggacctgtcagagaacccatgggaagaagctggggcacaagaaaggaaagcagcaagagtctggcagacattgacctatgaggaacttggggtcccatggaaaaggtcagtgggaatgcttctctgctcccttcatccctgcaataaactgctgaccactaagctgttggggagcccctctgccctcacaaccacagacaattctgttggtggcaatttggtaactttccagggtgagagaattggctggccagcttgtgctggtggatctgcactccactcaggtcctacctgaaacagcagatgccatacttgttgttcacccattatgggccactgccctgccagggaacctcggcccttacgttgcattaccagatcccctgcaaacatactccagaactcactctgaatttggcacccacaggggatcagtgggtccctggagagctgtgagttcccctgagatctagccctcagtgtgggcatccctaggggaggatgcagtgcagcctgtcaaagcctcccttgggacaaaggaaatgtggaaatggtgttgatcactgaagggggaggcactggtggccgagaataggtgtggagagggatcatttccttctccctcatccactgttgcagacacagcagaggctttccccactggaggctggtgcaagcacacgtggagacagcctttccaggtgccacttgcagaagctgcacccccactgaaaataagcctgtgctacctggacatgcacaaaagtcagggcccatctccctcttcctacactgagaagcaggcaatggagggcagacaagtcacagagctggaccgggggaagaggctttgccctgagcccctttcagtggtagccaccagaggggtttttctgcagaactcagtcacactgcagccaggagccaaaggacaatgtctgtatgaactgaatattgcaggccctgtggcaggggcatgatagggaagcagattgtgttcctgcctgcccagggtgatgagttggtgctgtgactctctcaacctcacctgtccctaccccaagacttcagcatatcccaacacgaactccccaaccaccctccatctggcaggtgcctctccttatcacttggctactgagggtgagttggctcttattaagtgccacttactagactggagactgaactgctccaccaaataaaaacccgctatcagaagggcatagtgctagtgtatgagataagcttcctgagacttccacactcagccccacagaagatagtgagtcagctcatactcccaatacattgctaaaacaagcaacattttagaaaaacactgcacaaaagctgtctataaccaaggaacctatacagagccttggccccctgaaagcaccaagaaatgaagcaaataatcacagcatacatgacagtcataccctcaagggaaaaaaaagataaaattcccatccaaataatagcacattcaaaaataaaaagcaacagtactttcagatgaggaggaatcggttcaagaactctggtggtagaaacagacagaatgttttgacagccccaaaggctctcactagctttctaacaatggatctcaaccaaaatgaggattctgaaataacagataaagaatgcaaaatatggattgtaaggaagctcaatgatatccaagagaaagttgaaactcaacagaaagaaaccaggaaaaccattcaggatatgaaagacagctatattaaaacaaacaaacagaacttctggaaatgaaaaaatttagtaaaggaatttcaaaatatagtggaaagctttagcaatagactagaccaagaagaagaaagaattttggagcttgaagactgatcttttgagttaatccagtcagaaaaatataaaagataattttaaaaaaggaacaaagccttcaagaaatatgggattaggtagagcaaccacacctacaacttataggcattcctgagtgagaaagagaaaaagtaagcaatttggaaaacatactcaagggaataattcaggaacatttctcttattgctagaaagttagacatcaagatacaagaaattcagagaaaaactgtgagattctatacaagatgaacatcaacaaggcacatagtcatgagactatccaaatacagtgctaaagaaaaacgcttgaaggtagctagaaagaaggatcaagtcacctataaaggaagtccaatcagactaacagcagacttctcagcagaaccttataaaccagaagagattgggatcttatttttagccttctgttgtccaggctggagtgcagtggcatgatctcagctcactgcaagctccgccttctgggttcacaccattctcctgcctcagcctcccaagcagctgggactacaggcgcccaccaccatgcccagctaattttttttaattttttttttatttttagtagagacagggtttcactgtgctagccaggatggtctcaatctcctgaccttgtgatccacccgcctcggcctcccaaagtgctgggattacaggtgtgagccaccgcacccagccttttatccttcttaaagagaagaaaagccaaccaagtatattatatcctgcaaaactaaatttcataaacaggggagaaataaagtcttttccctaaaggaaaaaaagtcagccaagtatattatattctgccaaattaaatttcataaacaaaggagaaataaagttttttccggacaaacaaacactaagggaatttgtcaccactagaccaactgtgcaagaaatactcagaggagttctaaacatggagacaaaaggatgatacttgctacagtaaaaggacacataagtacaaaattcacagatcttataaagtgattacaaaacaactagttaacaatactattacaggaacaaaacctcacatgtcaatattaatcttgaatgtaaaaggcctaaaagatatagattggcaaattgtaccctacaagagactcattgaacatgtaaatacaccaataggctcaaagtaaaggagaggaaaaagaaacatcatgcaaatggaaaacaaaaaagagcagaggttgctattcttatatcagataaaacagactttaaatcaacaacaataaaaaagacaaagaagggcatcatataatgataaagggttcaattcaacaagaagatttaattatcctagatatacacatacccaacactgggttcccagaggtataaaacaaatactactagaccgaagaaaagagatagactgtcatacaatactgacggggaattcaacaccccactgacagcactagacagatcatcaaggcaaaaaactaacaaagaaactctggacttaaactgaacacttgaccaaatggacctattagacattgaaagaacattccacccaacaactgcagaatataatttttttcatctgtgcatggaacattctctaaaattgaccatatacttggctataaagcaaatctcaatatattaacaaagtgaaatcatatccagtattttgttggaccacagtgaataaaattagaaatcaataccaagaggaactctcaaaaccacgtaagtacatggggccgggcgcggtggctcaagcctgtaatcccagcactttgggaggccgaggcgggtggatcacgaggtcaggagatcgagaccatcctggcgaacacggtgaaaccctgtctctactaaaaataccaaaaaaaaaaaaaattagctgggcgtggttggcctgcagtccctgctactcgggaggctgaggcaggagaatggcgtgaaccagggaggcagagcttgcggtgagctgagatcgcaccactgcactctagcctgggcgacagagtgaaactcggtttcaaaacaaacaaacaaacaaaaacaaacaaacaaaaaacaaaaccacataagtacatggaagctaaacaacttgctcctgaatgacttttgggtaagcaatgaaattaaggcagaaattaaaaaattgaagctaatggaaatagagactgaacataccaaaacctctgggatacagcaacagtagtgttaagaggaaaaattatatcattacatgcccacatctaaaagatagaaaaaaaatctcagattaacaacctaacgtcatacttcaaggaactaggaaaacaagaacaagccaaacccaaagctagaagaagaaaaaaattaacaaagatcatagatgaactaaatgaaattagttccaaaataatcatacaaaggatcaatgaaaggaaaagttggttctttgaaagtataaacaaaaattgatagaactctagctagattaaccaagaaaagaaaagattcaaacaaacacaatcagaaatgataaaggtgacattacaattgataccacagaaatacaaaagatcaccagagactactaggaacacctctgtgttcctagagaacttagaggaaatggataaattcctggaaacatacaaacttcccaggttgaaccaggaagaaatagaatcctgaatagaccaataaggagtaatgaaattgaatcagtaatgattaaaaaaaatctaccaagaaaaacaaagttcagaaccagatggattcatagctgaatgttaccaattgtacaaaggagagctggtatgaatcttattgaaactattccaaaaaatcgaggaggagagattcctccttaattcattctatgagatcaccatcatcctgatatcaaaatctggcaaagaaataacaaaaaaagaaaactataggccaatatccctgatgaacatagatgcaaaaattctcaacaaaatactagcaaaccaaatccaaaagcacatcgaaaagataattcaccatagtacagtggattttattccagggatgcaaggatagttcaacatatgcaaatcaataaatgtgattcaccacataaatagaattaaaaataaaaacaatatgatcatctgaatagatttaaaaaagcattagataaaatccaacatctcttcatgataaaatccctaaacaaaataggcattaaaagaacatatttccaaataataagcaccatacatgacaaacccacggccaacattatactaaatggggaaaaattgaaagcattcctcttaagaactggaacaagacaaggatgtccactctcaccacttctattcaacatagtactggaagtcctagccaaagtaatcaggtaagaaaaagaaataaaagtcatctgaattaaaaaagaggaaggcaaattatttctgttcagtgatgacatgatcttatacctagaaaaccctaaagactctgccaaaatactcctagacttgataaatgacttcagtagtttcagatataaaattaatgtacagaaatggttgcatttctatacaccaacagtgcttaatcggagaaccaaataaagaactcaatcccatttacaatagccacaaaataaaaatgtattcctatacctaggaatacatttaaccaagaaggtgaaaaaccaccataaggaaaacagcaaaacactgatgaaagaaactgtagatgacacaaacaaatggaaaagcatcccatgctcatgaataggaagaatcaatattattaaactaactatattgcccaaagcagtctacaaattcaacacaatttgtatcaaattgccaatgtcatttttcacagaactagaaaaaacagtttttttcctatggagccaaatttatatggagccaaaaagggctcaaatagccaaagcaatcctaaagcaaaaagaacaaaatcagaggcatcacattgcctgaccgcaaactatactacaagtctgtagtaaccaaaatagcataatggtacaaaagtggacacatagatctatggaacagaccagagaacccaaaggtaaagccacagacttaaacaataactgattttcaacaaagtcaacaaaaatagaaaatagggaaagaacaccttaatcaataaatggtgcttggaaaactggccagcctcacgcagaagaatgaaactggacccctatctttcaccatatacaaaaattataataatactaaagatggattaaaaacttgaatgtaagacatgaaactattaaaatcctggaagaaaacctaggaaaaattcttctgaacattgacctaggcaaagaattcatgactaagacctcaaaagcaaatgcaacaaaaacaaaaatagacaaatgggacttaattaaactaaaaagcttctgcatagcaaaagaaatgattaacagaataaacagataacctaccaaatgagagatataattgcaaactatgcatccaacaaagtactaatatccataatctataaggaactcaaacaaatcaacaaaatccctcaggtagccctactaaagagtggacaaaggacatgaacagacactactcaaaagaagacatacaagtggccaacaaatatacgaaaaatgctcacatcactaatcatcagagaaatgcaaattagaaccaccataggataccacctcacactgtcagaatggctattattaaaaagtaagaaaataactgatgttggtgaggatgcagagaaaaagaacacttagacactgttagtgggaagataaattagttcagcttctgtggtaaatagtatggagatttctcaaggaattgaaaatagaactaccatttgcccagcaatcccactactgggcatctatccagaggaatcattttatcaaaaagacacctgcactcatatgttattgcagcactattcacaatagcaaagtcatggaatcaacctaagtgtccatcaatggttgattggataaagaaaatgtggtacatatacacaccatgggaaactatgcagctgtaaaaagaatgaaatcatgtccttcgcagcaacatggatagagagaaagaccattatcctaagtgaaataactcagaaacagaaaatcaaataccacatgttctcacttttaagtgggagctgaaccatggatacatgtggatataaagattgaaataatagagagtgaggactccaaaagcagggagtgtgggagggggtgagggctgacaaataaccttttgggtaaagtgtgcactatttgggtgatggggtcactagaagcccaaacctcaccattatgcaatatatccatgtaacaaacctgcacgtgtacccttcctgcatctaaaataaaataaaataacaaaaaaaggaaatgtgaatttgttacaatatgactgagatgttagaaaaaaattgagcataacacaagtttttccatttgcttacaagtgattttatccatgaaaaacactaagtgaataagccatataagaatacacaaaatgggctgggcacagtggttcgtgcctgtaatcccagaactttgggaggccgaggcgggtggatcataagatcatgagttcaagaccagcctggccaacatggtaaaaccccgtctctactaaaaatagaaaaattagctgggcattgtggcatgcacctgtagtcccagctactcggaaggctgaggcaggagaatggtgtgaacccaggaggcagagcttgcagtgagctgagatcgcaccactgcattccagcctgggcaacagagcgagactctgtctcaacaaacaaaaacaaaaacaaaaacaaaaacaaaaacaaaacaaaacaaaaaaaacaggaatgtatgtgtcatgttatagaactgactgtaccacaattggttcacctatcaaccacttgacagacatctgggtaatatcttgaataaagtttggggctattttgaataaagctttataaacatttgtgttggaaaggcagaggaagcacacttaaaggtcccagtgtgggtggagcctggaccatgtctgcatagaggaggacgtggcattgagctcgctcttcatttgtaccccaagacccctggcttcctcttggattcagtgccaccaagacctcctctggatggccattttcaactctatagtgaggagggaataatgggaaagggaaaacgttaatttcatttagaagcaaaattacagtgttcaatacaattaagtatgtaatatgttttgttatattcttatgaatttgttcttagtatatgaagaatattaactctgacataagttgcgtatatctttaaaaattcggggaagtagaagtggattttctatcaaagttgcaaagttctggagtaatttgatgagtaattattttctttcatttttcagcattaggcagtttcactgccctctctctcttcccagaattttctgtgtaatttaacaagatgctgaatgggatttatcttgctgcaaaaagctattttcttattctaaaaagaccataacatactacctccagggataatattctctggagatggcaggactagccctaagtttctccccatccttcctatctatagacgtaaagaaaaaaaaaagagagagaaaagggagggagaggagagaatcatagccaagggcagggagtactatagtgctatagtagtcccagctacttgggagagtgagttgggaggattgcttgagcctgggtgattggggctgcagtgagagccatgatcataaaatggtaatggtattggatcacagcagagctgtgatctgtgctgctcccataaaggcaaatgagagaactccaagggaaaagtctgtagagattggaggtgccatcaaagaaagaaggagtgttctcatcatctggttacattttacgtaggctacttatttgttgatgtgcctcagtagtacctggatagggggaagaagaagggagagagatggcaagcagagagtcttggcctgcactctgacctttggcttgataagcaggagaaaagtgaagatgtggtaatagatagagggatttgagtcattttactttgcccacccaagaggatgacctggctgattggaaccagaatgctcacatcatggaacaggaaatgtcaggttaaatctgttctaggtgtaataacacgttgagaggcagagatctgatggttaagagcatagggtatggacccaggtttaaatcccaccactgctaattatagagttatgggaaattctgtaaactctccagactcctgtttccccatctgccaattgggtaacaatggtatatgcgtcatagtgatattttcaggaataaaatgagccaatacacgaaagttcttaactcatattaacttctctataaatttaagtcattttttattttttttcttgttttttttttcctactctgtcactgaagctagagtgcagtaacatgatcacagcttactgcagtcttgaccacctgggctcaagcgatcctcccatctcagtctctcaagtagctgggagtacaggtgtccgccaccatgccaagctaatttttaaattcttttattgaaatgggatcccactatgttcccgggctggtcttgatgtcctgggctcaagtgatcctactatctcagtctcccagagggctgggattataggcctgagacactgcgcccagcttcgtttttcttaagaaagcttgacttattttttaaaaaagtaaagatgcatatgaaggaaggtcttcctttttggttcatataaagtgctgattttattttagggaatataaattatagtttaatttataacatcattacttcagttttggctttctaggctgctatctccattgtaaggcctgacaacattaccaggtagcatgtcttctcttttttctgttgtttcttacatttccagttttcctcaacttcccccctcatcccaccaaaccaatattcctaatgttcaagacagcaatcaacataatagctagaattccatggcttacttttaaataaaggaaagtatttttattatattagaaacattacaacatagtgcaaagatcaaatattcattgaaaaatgcatatccagaaattctgtggttgatgaatttggtcgaatatctagagagaggatttagcacaaacattcagcaccatctagaatcactgtgtactatgtggtttcttagagaaaacattcaataaaaacaatttaaaattggaaatacacaataaaagtgaaataaattaaaatttaagtttggtttggttatggggggactagaccataaaggaggtagcttctggggttgtaagtgctattcttctggctcagctccctgttccccaatctactgatggatttaatttttttttctgggctattcagatttagctctgggttttgatgtattcctggactcagcatctctggggttgacacagaccagctgacctcttttagtctgaaagctatggggaaaggcagaagattaagaagaatctagccagctgggaaatttctggacccattgtggcccctccatccctctttctgacttgtcctctcagagtctctctctttctcagcaatcagctcccatgccttagggttccagtttcccagagtatctcatgagaatctcttcagtcagcaccctcctgccatcatgtcctccctctctcttcctctgcccctggccagcctctcctgtctccctgatgaccctggactgttcagaaaatacctcagagactcttctgtgcctgtgaggggcccagagagctgggtattcccaggatggtgtccaatccacctccttacacccatgggggctgctccagtgtctcccccaggaatgggaaggaggaatggcccttatacaacactgggcttagagcacaggctgcaggttttataacagtctgctgcaaaatcttgagggatcttctagggggtataagggaagcagcaggaggctgtggagtcaacaccagctgtaggagaaggcacagcaagagactgagttattgagaagccatagaaaaccaacttcccctctccatgccccctgctctccctttaacccaaaaaagatcagaaggaactagaaggaactagaaggacacagcatttcttaagttggggaattcagatgaactgggacacacatgtctttcctacaaattactttgcctttgtctatatcactccatttttatttttatttttactcttttagggatttagctcactaaaatgtctcatcttccagttcatctcttttgggagggaaatttgtctgtcctgtgatatcgcaatactaaagagatgaagctgggatatgtcacatatcaccaataggacaggcctctacggaatagctgacatgaatttaggcttacatgcaccagtgggaaataaatagagctgccagttactctgtgaattgggcctcaattatcttatcaggaaagtggaaattagcatctcctgctcccactctctgaaccacttggtggaatgtgatagcctggacccttttgaaaaaaagactttttgaagagaatggccagggcgatttgaattcctgttttgagtgctccattttcaactctggtgatctttattttcagggcatgtttggtgtggtctcacctggggccaaaaagggtaacatctgaataaggcagaagagatgacactctcccacagtaccaaggaggtctgggagcagaggaccacaatagggggaggagaatggtggagacagttgaaaatgcctgtgtgatgctgggcaggcaagggattctgggcttgagtgtcagcatagttaagacaagcaagcttgcgtatttgaagctggcacctccttcttgggttcaagccattgccccttctctttatagagagttccattttgtgggaagatagaaactggggatgattggaggaaaatattttaatcagaatgttagtgtcatgttgggagttacataattcaggggttgccaacaccctttggtcaacacagaagttccaagtatatgcaagaatagcttaccttcagccgggcgcggtggctcacgcctgtaatcccagcactttgggagaccaaggcaggcagatcacgaggtcaggagatttagaccagcctggccaacatgatgaaatcccgtctctactaaaaacacaaaaattagccgggtgtggtggtgcgtgcctgtagtcccagctactcaggaggctaaggcaggagaatctcttgaatccggaagatggaggttgcagtgagctgagatcgcgccactgtactccagcctggtgacagagcaagactctgtctcaaaaaaaaaaaaaaaaaaaaaaaaaaaaaagagagaatagctcagcttctccatcgaatggggacacttctgagaaaattgcttgctcagtccattcaagttgttctgaagaaataatttcctcagtgagtgggtgatcgggacttggtatggccacaggctccctcacaaaaatggatatatctgtgaaccatgggctgcctatttctctcctgtagagtggaaggtgctgatgctctttcacaactgctctaactatacggatgtgatataactgatgatgtcacaatagcctgtcataagtaaccttcactatctggattgtaagatcctcttctaagacgatatcctcattcacacgtctggcgcctggactgggatgtttgaaggacaagctctgctggagctgtcaactagagccgtcaacatgccctttcaagatggcagccttgagactcaaagatgagtgttcctagtaaactagggtcatacttatggccttttatgacctagccacagaagtcacagcatgtctcttccactacagtctgtcggtgaaaacagccacaagcctgtccagattcaaggagagagaacctagatctcatctatcaatgagaggagtgtcacagaaatatggccgtctttaaaaaccactacaacattattttatctgtaaatatttattttagtttctattgcttctgtaacaaattaccacaaatgtagaggcttaaaaccacttgaattattctcttacagttctggaggtcaaaagtctgaaatgggcctcactaggctaaaaccaagctgttagtggggtggcaattgtttttggaggctgtaggagagattccaatttcttgcctttattggcttctagaggctgcccacatggattggctatagtgggcaatggatggtccagttcttctcacattgtgtcagtctgatactgacactcccttataaggatccttgtgattatgctgggcttactcagatactccaggatattctccctatctcaaagtcaggattagcaaccttaattccttctggctgtgtacaggtctcagggattaggatgtggatattcttttgggggaaatgttattctgactaccacaatatttcagtatgtatctttaaaataaggattttaaaacccgacacaatcaaaataccattacttatttgccatctgtgtattctcctcagtctattcatgttttttgtccattttctaactggatggtacatttgcttactttcgagttttgagaattatttatatattctgaatacaagtcctttgtcaattaagtggtttgcaattactttttcccagtctgtagtttgtcttttcattctcttgacaagggctttttgaagagcaagattttaaaattttgatgaaatctaatttgttgcttttttcttttatggattatgcatgcttttggtatcaaatgtgaatttttttttacctagtcctaggtcctaaaattattttttctatttattttattgttattttactttattttttaagacagagtctggttttctcacccaggctggagtgccctggcgcaatcttagctcatagcaacctccacctcctgggctcaattcttatttttttctaaatgtcatgtcttacataacacacatgtcccagtttatttgacttccccaactttaatgggagtttgaatcaccctgatcatgaagtctatgatccattttgagtaatttttgtggaaggtgtgaagtttacgttgagatttgttttttggtctttgatgtccaattgttcaggtactatttgttaaaaaggctgtctttccattattttttccataaatgtttggtagaacttgcttatgaaaccagctaggtatgaagatgttttctaaccatggtttttaattattgatttaattccttagtggaaatgaaaccattcatattttccatatcttctggtaacacattcttgtgtcaataaattatattcctaataagggagaaaagggactatactctaaagcactagcagaatttagcaagcatgtgtcagcctgagcaggggaagtagacttgggtttggattttgaggtgcttgataaaaggagttggaatataagcctcgataagagacaacttactgacttgggagtattctttccggatataggctgtaacctcttgagaaggaccccaggggttggtacagatttgttgtcagaaaggctccagaagcctgagaaagcaatggctcatgccgagtgaagttaaaatacccgaattgccatgacagatggagaaggaagggattaaaagagtcatggaagtggtcatgctggagtggatacattacatgaggccagaagactcaccagattatgttccatgggaatgcactattcaccaaagccaccaggactccctggtgagaggagcaccagcatttctaagaagttagtggtcccgccttctttataggctagggctgatggtaagagtggctgtcacaaaacttggcccattgatagctcttcctccttgaagcagtggggccctctctccttgaagcagtggagctttcttgccttgaaacagtggaggctaggtagcagcatttaacaaacagaagccaaggggttctaaatatcgttatagccagcaaggttggagtgacaatcaaggggtcttgacccatggagagttgtggcaatggttaatagaacaagcatctctagagggaaggtgaagtggaaatctctgaaactgcccccttctcccaggaaaaaagagtagattagaaacaatattgcaatctagtggaggggatggtggagactaatgccacccttaaggatacaaaaaatgcaaggaaaatggttattatcatatctatttaatttgcaagtctggcttctgcagaaactggatggatcctagagaatgactgtagaacactgtgagctcaaccaggtagtaacctgattgcagcttctataaccaggtactgacacatgccaggtattaagtacatgttatgtacctattgatttggcaaatgcattctgtcccataacaagtaggaaagaggataagaaaaagttcccattcataagaatggaaaatattcacttacagttttcctgtagactattaactctcatcttctgcatactgtagtctgaagagatctgaattttcatgtatctctcaaaacaacacattgatccattacattggtgacatcatgttgatagggcatgatagacaagaagtggccatatgttggacactctgtaagacatatgtattccagctgggtgcggtggctcatgcctgtaattccagcactttgggaggctgaggcgggtggatcacctgaggtcgggagttcaagaccagcctgaccaacatggagaaaccccatctctactaaaaatacaaaattagccaggcatggtggcacatgcctgtaatcccagctacacaggaggctgaggcaggagaatcgcttaaacccaggaggtggaggttgcggtgagccgagattgcgccattgcactccaacctagatgacaagagcgaaactccatctcaaaaacaaaaagaaagaaagaaagaaaaatacaaagaaaaaaacgtatgtattccatgaggtgggagataaatcttttaactatttatggacttgtcatttcaggaaaggttttatgagtccagttgtcaggggcatacagggatatctccttcaaagtgaaaaacaaattaacataatgtattagcacaaggataggaaaataaaccattggaacagaacagaaattccaaaagcagaccacaaaatcattgaaatcaataaaccgagtaaagcagattgccctctctaatgtggtgggcttcattcaattagttgaagttctgaatacaacaaaaagcctgaccctcctgcctgtaagagggaattcctcttgcctgattgccttcacactgggacataggtttttctcctgcctttgaacttaaactgaaacatcatctcttcctgggccttaagcctgcccattctcaggtctttgaactcaaactgggactacactagcagctctcctgggtctccagcttgccagctcaccctgcagatcttggaacttgtcagccttcataattaaatgagccaattctctaatttcttattttttatacacacaccattggttctgtgtctctggggaatcctgacttatacaatggtcttaccaatgagttgccaaggtccattgggtattcatgtggcaaaaaataaatcttgaatccttcttcacaccaaacataaaaatcaactccagatggattgtaatttaaatattaatgctaaaacaataaagcttctacaagttaacataggaggatatctttattgccttaggataggggaagatttctcattagatcacgaaaggcctaactgtatataaaagattgaagcatgtgactctcttaaaaggaaaaacaattgtgaaaatccattaaagcattctgctctatcaaaggaggctgtgaccactcatttctgagaaatatctgtcatgtgaaaacataatcacatgattatgcataatcctaagcataatccctgggtgcttccaactcctggtcacccatctggagatacaacttctccataagcccctcaatcaacaagtgaaccactcgtttgtgtaccctaaacctttcaagtaaccataggcaaccctgggctgagaactcacatgacaccaccatagttaaaatgtcttgcatcagcacctccaatgttcccatggtccagtctgcctataaaaaggagagacaacagctcataccccagaaggaggccaggagttgtgagtttccaagccccagctcactctgaccacttctctgcctgcccagcatcatgaagggccttgcagctgccctccttgtcctcgtctgcaccatggccctctgctcctgtgcacaaggtgagtctgtcatccatgtgctttgatggctccctgggcagaagtcaggcgacatcttccaagtgctgtggcctgaaaaccctcgtgtgaaattagggatcctcaaatggggtttcaaagtgacatcattgttttcttcaagaaggttgaaaagcagtctattgatctgggcagcaggatgggagtcagagaagttttatcctactgagataaatgagatggttgaagtctaattcattgggttattagcgtgaggtagaatctaggtctatttagttctcactggtgctggtaagttttacaatgacctcagcagtctcctagagttcaaccccttgggtaacataaaagatgtctatacttttctcagctatcttgtgatttaatctattagaaaaaaaattccccaaggagagttaggagaagggcatagactattcagggagcttgattccctgtagcgtaaaataaagactaaaatggagagacaagactagggaaattaaggagaaacaaacaaaaagccagattatttccagctttcttttcctgcaggcctcaactctgagctatgctgtctccctttgctcctttgtgacccgcctgggcttcttctcctgagcaactcctgttgtctttgttccctcagataagattcacaccccatgcatctgctgcttctcctacacctcccagtagatgcactgcaaattttcggttgcctattataaaaccagtggtgagcggtcttaaaattaaaatcctatgatatattttaattactttatacagtcaatattcatttagttttcatcacatatttgctcttcctgtcctcttaaattcttctgcatctctgagctccatctgcaatcacttttcttctgcctaaaggaatcctcttagtattttcattactgtgggtcttctgatagtgaagtctccattttttgcttgcttggaaatgtcttcattttaccttcattttaccttcacactggatatgaaagtccatagtagctcccacctcctacttgtgcttacgtgctccttgtcccttgtcccatgggttgtctcctccatatgccctatttgcagacagaaggactgatgctgacattacgccagggtaagagcaccagctgctggagtcagcaaatttgcagtggatatggagaaacataagagaggcaggagacaatggggtgccttaaccgtgagggaaccagcatccagaacctgagaaaaaccaagtaaatttcttccactcttgaaaagggaccagcaagaagttgatgaagacctcactgctcaggactgtgaagtagggcacaaaaggaactaaggaagtcaggcattcatccttgactttgagtgtttcttttaaatctctgcctctgtcttactctcactcccttgctccctcttcagggagtatagctcttggaatggctggcctttgttccatctcttttgggtaggaacttcattcagtctacagagacttttcccagcaagagaccatcgtctctaaatcgctgtaggagtagagcttctcaggagaactgaaggaactctgccacttcctcaccctaggaaccaactagacccagagtttgcatcttgtgaatgactgagttaggccccagttttcccaactaacaatgggtcctagccctctcctgcctttcagatctaggttagatatctaagtcctcagaaaatagcccagaacattttgaaaccttttgtgaagttctttgattttacttagagaatcttaatccacaagaattaagtgatatggcttaaatgtctgtccagagcatagggaaacaactctaaaatgaagaaaggacaagggtcaagagagtctcacgggacagatgagacttgtgagctgagggccatggagaggagatggagggcaccaaagaagacctgttcagtgttgggcaggcagaggagtgtaggcaatgccaaaacaggactgggcactcactgccacctacatcgttctggggtccaagccatgtcctcaaccctttacaggcaactctaaaccatgaggagctggagactggggatgaccagaggggaagatgttaagtgcatggtgtcttgctctgagttgtacatgttggggtaccttgggtcccccaggggttcaggatgtacaagagcaactcaactgctcacttgttggggctgaatgtgcagaaatgtttttgacagtgagagagggtgagatgttagtgttgaagtcatacgtacaaggagagatcttcagattaacacttccaccacagagcagctctctaatgctgtgctgcagctcctctgaccacatggtgtgatgtaaatggtcatgccacagcgttctgggcagcacaagtcacatttaaaccacaccctgggtgaaaaggaccattacatcgtgttaatcggagtgcttctaagaaatgcttaactcatgaggaggacgtcaagaattggtgttaccaagaagccaagcttagctggtaccttctatcaagaacagatctatttgtgaatggcaccatggtcatttcctcctatggaacagatatttctagtgttgtgtttccattgcacagaagtgacatgtaagatgataccccagaatcttaagtagttcgagttgtgtttgatccagacccaaatggacagaatggaatagggaaagtctggactatgggaatgacaagaatgatggggccaggcttttaactgctgtttgattcattgaacattcatagctccctacaatatgccatcattgggtttgactctgggtaatagacatgaatatgcatgacatatggggtgtctatatagatcaggagccttagatgcccttattttttcacccaggaagcccacagctaggaaaatatcctacagaaataacctcacttatggagaaagttttttgcatacagatgtttggcacaacttataacaatgaaaaattggccaggtgcagtggcttacacctgtaatcctagcactttgggaggccgaggcaagcagatcacctgaggtcaggagttcgagaccagcctggccaacatggtgaaacctcatcttcactaaaaatacaaaaattagctgggcatagtggtgcacgcctgtagttccagctactcaggaggctgaggtaggagaatcgcttgaacctgggaagtgggggttgcattgacctgggatcacaccactgtactccatcctgggcaacagagtgagactccatctaaaaaaaaaggaaaaattgaaaccaacccacatatgttacagtagtgcatgacaatattaatgcactaggcttaagtaaattaggcagttcttaaaaatactggaatgatttggaaaagtcttttaatattaagcacagtcatatgctgcataacaatgctttggtcaatgacaaactgcatatattatacagtggtggtcccataagattataattctgtatttgtactataccttttctatgtttagatatgtttagatatgcaaatacttaacattgcattgcagttgcctacagtattcagtacagtggcatgctgtacaactttgtagcctaggagctacaggctgtaccatacagtgaaggtgtacggtagactacaccatctaggtttgtgtaagtctatgatattcccacaataacaaaacagactaatgacaagttcctcagatgtatttttgtcattaagtgatgcatggctgtataaataaaaaaatacaaaattaaaacctgtatcatgacaacagtaatgtcttcccccaccagacacagtaagaagaaggaaaaaagcaaatgagcaaacagtactatcataagcctagaaaaaaactgcactggaaagaaatataccaaactgttttttaaaaaaaaaaagtggctaggtttgggtactagaatttttcctaccttcaatgaaatttttttttcaggttttgcatcagaatgcacatatgccacaatagggaatgtagaaaaaaactctcacattcctgcctccgtttgcctgctgcctacccagctttgagattctaaatgagtttttattcttttctgtattttatgtgttttcaaaattagctttactgctttttggtgtaatctatagttcacataacaaatcatataaaaagctatttgaactaaaaacactagtaacattgctcttcctgtactcctatgagactccctcgtatgcttgtggatgagacattatgaggatgtgatgactgagaaagcagcggccattttgggaccacgaggtgacaagctcaaataagaaaagccaacaaaatggtgggggaaggggagatgttttaagaagcctgagttcttgatgacacaactgagctgttaaacaaactcagggaggaccacctgtttaaatttatttatttacctaattatttatttgagacaaagtcttactctgttgcccaggctggagtgcagtggcatgatcagagctcactgtaggcttgactttccgggctgaagcaatcctcctgcctcagcgtccaaagaagctgaaactacaggcatgcccagctactttaaaaaaaaaaaaatttatagagacagggtctcactatgttgctcaggttggtctcacactcttggcttcaagcaatcctcccaccttggcctctccaaatgctgggattacaggcatgagccaccatgcctggctctgatgtccatggtacatctatgctgttggaacagctggggaggctatcagaaggttctgctcaatgggagaaaggctttatctaaagacctgcccttgtgagaaggcaccagctaacccagtctcagggtgacaccagcatctcacctcctttcactgtggaaaccatttccccaccaagggatcaactgaagcattcttgcaaatagcctgaatctttgtggtgagctgaagctctcctggtttgtgcaatgcacagcatgacaccagtatcatgattaaaaaattttccccttcagagaggatcaggaaaaactaatgggtactaggcttaatatctgggtgatgaaataatctgtataacaaactcccatgacatgagtttacctatgtaacaagtctgcacatgtaccccgaacttaaaagtttaaaaaatgaaaaaagaaacaaaattcctcctcagtctccccaagtttatatcttctaataccccaaggctgcctgtaaagagaagagatggctgagaccccagaaggaggcagcggctacaagtcctgagttcagctcttcccggcagccatgggagctcacactctgcccagcatcctggggacccctgcagttgcccttgctgtccttttcttcactgaggccctctgcccccaggcccgctgtcccttgtgtgaatttgtcttttgctcttgtgcccctactgtctggccatggcttggaccccactgcccgagtctatctctaagacctccaaatacagaacatcagagggatttcagggactatttcccgaggaggatttttcttcctaagaggtttcagcaactctgttctccacctctgggagacagagggagagtgagtcccattctatggatgagaaaatggaggcccacggggattttgacaagaggtaggatctgggtccaattggttctcagtggtgtggccttggctgtccttatgaattcagatggaactccccaaggagagatgggatgggaaatagtttgctcagaaaactaaatttccagtaaagagacatagagacccagaaccaagacagccagagaatgagaaacaccaagagaaagatgcagaaattaaaatgtcagggaaaagaagaaatgccagcttccttctggatctctttgtccctatatccccaccccaagcggtgatatctcccagttcttcctgactctcaaggaaagggaccaggagcagctggcttgccttgtgaacaatgacttgggatctttctgtcctgtctcttgcagttggtaccaacaaagagctctgctgcctcgtctatacctcctggcagattccacaaaagttcatagttgactattctgaaaccagcccccagtgccccaagccaggtgtcatgtaagtgccagtgctcctgcccacccctcgggagggaggatgggaggtttggggtgaggtcccctcagagtactcagctctctaaggcccatcaaggtaaaggactccaggggaggcccctgcagtgttttgtgacctggcctggggcctgcagagtcctgaagggcctgcccctgggcagagggaagagagcagacatgacaacaggaagtttgcttcctgaggaaccccatctgagacatttggggaaggcctgtgaaccccgaagttaaggggaaattttacgggcacgaggacaggccctgagatgcctgggacagagaaggacgcaggggccacaggattcccctgatgaattcgtcagttcttaactcttcctcccttctccacagcctcctaaccaagagaggccggcagatctgtgctgaccccaataagaagtgggtccagaaatacatcagcgacctgaagctgaatgcctgaggggcctggaagctgcgagggcccagtgaacttggtgggcccaggagggaacaggagcctgagccagggcaatggccctgccaccctggaggctacctcttctaagagtcccatctgctatgcccagccacattaactaactttaatcttagtttatgcatcatatttcattttgaaattgatttctattgttgagctgcattatgaaattagtattttctctgacatctcatgacattgtctttatcatcctttcccctttcccttcaactcttcgtacattcaatgcatggatcaatcagtgtgattagctttctcagcagacattgtgccatatgtatcaaatgacaaatctttattgaatggttttgctcagcaccaccttttaatatattggcagtacttattatataaaaggtaaaccagcattctcactgtgacgactctgttgattttgtttcactaatcggaatcacagactgagaggaattctgggggaggagtagggaaatatgaaaaggggcagaaacagcaagatagggaccaagtacttctacagtcataccagacatttccctggagatactttcctgaaaagttgaaacagacaccattagtttataaaccatattgtaactgaaatgtgatagaaaaattttctacttaaatgaatatcaagatgacgctgcaatgcatatttacgcacacaagctcattttcataaatgaagctttcctcagaatgatggctaacatctgttgaggtcttaccaagtgctgggttttgggctaagtacttatattagtaaaagtctagcaaatactgcccatagtctagcaaggactccttacctggaagttgctgaaagccttggtaatgttatctttgttctccactctgcttttggggaggatgttttccatgactatacgagatgaggcttggggctgggtggccagagttagcaaataaaaatacagaatggatactattttagtgtaagtatatcccatgcaatatttgggacctacttgtaccaaaaatgatttgttctttttctgaaactcgaatttaacagggtatcctaaattgtatctggcaaccctctgaagaaggaatactgcttatagaggtgtctgtttcctgttggagatgtctgttgattttggcttaagtgtagaacagggctttggcttaagtgtagaacagggctttggcttaagtgtggaacacggcttctcaaccttgaattcacattagaatcacttaggagagcttttaaaaattctaatgccaggtcctcacctccaaagttatgaatttaattggattgatgtgggggcctggcatcagtaatttaaaaactccccaggggatgttaatgcacagccaagtttgagaaccactgttggtgtggggtcacaggctgtttttaaccagcattaaggtttcagaggcactgcaactccgttctaatttttgaaggcatctgatctagttatttttggttcattccattggatggttaatcataagcagaaaatctatcagatacagttatttctagaactgggtttttaacacgtctcttccagcacagcactgggagctctgtggtcatcccttccgccgcccaccggctcccccattgtattgactccacattgccccctgctggtgaaacaagtgcgaaggtcagcgtctttagctccctgcctctgatgaatacagctgcaccttcacaaagagcacagctgttcattgtgatggttaatgttacgcgtcaactggactaagctaagggatacccaggtagctgataaacatcatttctgagtgtgtctgtgtggtgttccagaagagattagcatcagaagactaaagaagatctgccctcaccaatgcaggcaggcatcatccaattcactgaggtcccaaatagaacaaaaaggctgaggaagggtgactttgctgtctgcgtttgagctgggacatccatcttctcctgccctctgacatccacgcttccgattcttgagccttcagactcagacagggacttgtaccatcacctacccttcttgaccccttctcaggtctgtgaacttggaccaggactgacaactttggctgccctggttctcaggccttcagaccaaatcacaccactggctttcctggttctccagcttgcagatggcaggacttcttggcttccgtaattgtgggagccaattcccctaataaatatctcggtatttatatctatatcaacattggtatccaatctatatctatagagagaaatagcctactgtttctgtttttctggataactgactaatacattcattttatcatcaagataaatatttacaatgtgggatctgagaaggaggtggatttggctgcttcgggacctgctttcctgtcctgcctaatctctcacctcctcatttttgcttatattaacattagcttggactggaaaattctgctcttctagtcctgcaagctccagatcacaggattcttaattagcttggttttcaggcagcaagcagaaagtacatttctttaaaaaactactttttttccccttctctgctatcagaagaatcagtttcaaagtaagttaatttctttcttagtgggccttactaagactgatgcaagaaatagtctccaataccctgaattttcgtttttgataaaactttggctcgaagatggacttagaatatataacaggccatgggggtaaccggcaattttggtaactagaggtatccccactgactttgaccttagctactgccttcagccagttccacgtttggggacccatacttacaacattgcagtctatgttagttagggatggtttaagtcacagtgtcagaaaaataactcaatctggcttaaatgataaagggaacttattagttcacataactgaagcttcaagaaatagaattagtttcaggcaaaacttgattcagtggtccttgtttcgctatggactatacatgtctttctgaatttctgatctccctgcatttgagagcttcatcctagaaagaagttactatattcatcctagttactctattggcagaatagcttccagaaacttccagagcaaattgggaagacaatgtctgtatcctcgtattttgagccaagagcctgagttccacttttattggtctggctggcttggattaagagcccatctcttaacccaggggccagcaaactatggccattgggcccaatttgacctactacctgtttttgtatggcctgcgagctaagatgtttttacattttaagtcattgaaaacatccaaaagaagattattttgagaaatatgaaaattgtatgaaattggagttttagtgtccataaaaaagttttattggaatgcagttgggtttatttgtttctgtattgtttacagcccacagtctagcaaggactccttacctggaatgaatcatattttcatacgacaaagcagagctgagtagttgtgaaagacactgtatgacccacaaaacctgaagtagtttccatttggtcctttacagagcaagtttgccaacctgtatcttaattcatctttgtggccagagaagtggatttactgatttgtttcagctgatcaatgtctataacaagcaatgttgatgggctgaaaaccacacagactaccagaggggttgcttttccgaagaatcatgtaaggataaaagagaaagaaagagagaaagaccttggaacccaactagtatctaccaaatgtatgtaactttctcatattaattctgtctttatatgtgaagatgaccaatcccctgcctgtgattacatcacatcaagcatgttcttcccaaattgggggttcaattcagactctcctgttatatgccagttgtcttagggattttctcactttattcaacactatactcaatttttacattaataatgcagtaataatatacccctttgccattctgtattttcctgtataataataattattattgttattattattattttttgagacagtttttgttcttgtcgcccaggctggagtgcaatggcatgatcgcagctcactgccacctctgcctcctgggttcaagtgattcttgtgcctcagcctcctgagtagctgggattacaggcacgcaccaccacgcccagctaatttttgtatttttagtagagatggggtttcaccatgttggccaggctggtctcgaactcctgatctcaggtgatctgcccgccttggcctcccaaagtgctgggattacaggcgtgagccactgtgcctggtctttcctgaattattttaccggttttgtaaaaagattttgatcgggatataccctgttgccccacaaatgatggctagttcccaaatctgagactaagttttcattatagactttatattctaaactaagtcactaacaactggggccagacaatccttccagggcattgtagacataggaaaaggaaagaaagtggccagcctagtgggttccacctttgtgaaggagaggtctttacttctaactgctcttgaagcccagtgaaggggtctccagagggtaacttgtacaaactggaagtacctgcaaacaaggcaactcattttccagttggatgtcagcttacatggtgaacctcatgatttgcctgagccaaaatgagcaggggagaagaaaacagaagataggaaccaaagcagggaaaaggattgctggaggctgctctcccaccacatggaatgagctttccattggccgagtgatcctgtggaagggagctgggctcgagccatcctcccagtgacactccgcaaaggttgggggaatcacatgtcccattttgtctgggaaatgacccagtttatgccagttgtgccagcatagttattaatagtaacccctttgagtcttaaagtgctcatcctaccaataggagatccactgcttagcttacaaggatcttaacagcagtagctgatggggtggtctcagggccgctgtctacaaaggcccctggatgtgtgggcaagagggtgctgaaagccagtctgcccatcacctgtaaggtcttgcactcacacagggctaggtgtgctccatggtgcttttttgtaacatgctcaatggtgtcttccaggctagcaaaggcccagggtatgctgccagtggtgtgagcagaagagagaggtgaaagatgttgggcaagggtgggatctctcacctaagaaactatgcagagagaggaccctcaggaatgcccatctatccgagggaaatatacatgcattgcccataacttcaatatttttttaaaagatgcagggataacctagcagtgggggcagggactacatctgtaggcagttaaaagaattctttcccctctctcttttaaacatttaaattaaaaaaaattcttttagagacagggtcttgctctgtcacccaggctggagtacagtggtgtgatcacagctcactgcagactagaacttctgggctcaagcgatcctcctgcctcagcctcctgagtagctaggactatagctgcacactacaatgcctgctaattaaattttttttttttttgtagagacaggatctcactgtgttgcccaggctggtcgccaactcctggcctcaagtgttcctctggccctggcctcccaaagcactgggattacaggtacaaaccaccacaaccagcaaaattttctctttatattaccccacacagacaacccctctttccaacatgccagaggagttaaaaagagaaggagagagggtatctcagaaccaaactaaagcttcatcacactccaactaccagagcctgttttgctctggtgaagggcgaggagaaaggaagaagtagaaatgttagttaagtcaaatttaagattagggttctaaactgaaggaattttaataactggatgtgaccaaaacgtgataggatctccccaagatgttaaggtggagctgatgattggagaacagttaagcattttatgtttatagtctatatataagtaaggatagaataggttgtacctagataacaaacaaactcccagtggtctaacaaggtaaaagttttccactcatacaaaatctgatgtgggctagatcactggatctcacaatttagttgcatcagaatccactggtgggcttgtctaaacacagattcctgggttccacctgagactctgattctacaggtcttggtaagactcaagattctgcctttctaatgaggtttcaggtgatcctgatgctgctgacccatgaactacactctgagcagtattgatcctagagcagctctcctccaggtggtgactcaggaattcaggctgcttccatcctgtagctgtagattctggaatgagaaagaagacagaaaaggcatactgcttttaactgtcttggtccagaagtgacatgcttcacttaatcttacaattcattggccaaaattagccacaagagcccaatgcaaatgccatgaaggggaacatgtggactatttagtgaaccctactttgtctgccacttactcttaaaaaagaggttaaccaaggaaagagacctagccaatgtgaacttgcagtctattagaatcttttgcttttcctttcccccgattataataggctgtcagtttagtattcatctaatatatgaaggatttatgcaatattcatgttgttgagatgtgaaataaatcctagatctatttgaaatattttaaagttcatgggccaatggtgccagtcatcagatgttgagaggccttaggggaagaaagaatgagactctatggcttcatcaaggcagagatggctactatcatgattccggataatgcccccacacttgccctagctggtttgctatgacgggctagaggaggaatatctcaaaattggaagggaatataaaatgttgcatgagagaagctatttatgcaggtgtgtttgtgtgtgtgtgtgtgtgtgtgtgtgtgtagagagagagagagagtcaaaatgtactctttgggtctagacaggacatgtttgttgccttgatctcttcatagaatgggtaacataacagcagcgagcattcctgaagttctctgaactagactgaaatctgcaaagcttgtcccctcaatgagggacccagagcaagtggttcaagaggactaagagagaaccagtttttagtgcaaggccccagcttctcaaatcttggtttttgagttaaaaatcacatactcatacttatgaaaatcaaagcacaaagaatggaaaatgaaaagtggagatcctcatttcttaaaagttatggttgccagggaaatcacatttaatagattgggatatatcacacacatcaaatgtccttcttatgtttatgtaaatatatatagcttttaccaaagcaaaatattattatatgtacagttatataataaatatgtggtaatatagatattggtatagagatacacatatggaatgtatattctatatacatagttttacattaatatcttagatacctttcatttcactatgtatatccacttcattcttttcagtaattttgtgtttattatgtggttataccacaatggtttaaactattcatcttttaaagaatttatttctattggttgttttacaaacagagctgcaaacaacagcaatgtgccaacactttgtgtctttttttttgagacagagtctcactctgccacccaggctggagtgcggtggtgccatctcggcttactgaaacctctgcctcctgggttcaagcagttcttctgcctcagcctcccaagtagctgagattacaggcgccttccaccatgcccggctaatttttgtattttagtagagatgaggtttcaccgtgttggccagtctggtctccaactcctgacctcaagctatccacctgccttggcctcccaaagagcagggattataggagtgaaccactgcacctggccctcctttgtttctttagatagtgtttcttgaaatagattcctagaaataagattgaagagtatgtaaattttaaatttttctacagactgtgtaatttctcttcaaaaatgccgattatcaaaatgtcactttttgatactaaaaaatagattgttttaaacacacaaagtaagtagggcttatcaaaaagttaatatatcttgcatttctcacaagtatgttgaatttctcccacttgcattttacagcaggaatcctgactcagtctaactttcttatacttaaaaacataacaggccagaagttagcacacattttctatagaaggccagatagtaaatactggtgtctttgtgggttatatcatttctgttagaacaatgtgactccacctttgtcttgggaaagctgcaataaataatatgtaaaagggcaggagtggctgtgtttcaaccaaactttatttacaaaacagggtcatgctagatttgttctgaggaccatagtttcttaacctcaatctaggcaatccgtcaaataattctgcattcacaatagaagtcttgttgtatatattggctgactgtctttcctttctctaatgttaaccactgattttgtggagcatggattctagggaaataatacccaggtaagatgtctattaccatgtgtgtcttatttttaaaagagtggttaaattcttattgaggccgggcacagtggcttatgcctgtaatcccagcactttgggagcctgaggcaggcggatctctccggtcaggagttcaagacctgcctggccaacatggtgaagacccgtctctattaaaaatacaaaaattagccgggtgtagtgccatgcacctgtaatcccagctacttgggaggctgaggcaggagggtcactggaacctgggaggtggaggttgcagtgagccgacatcacaccactgcactccagcctgggtgaccaagtaagactccatctcaaaaacacaaacaaacaaacaaacaaaaaaacaaaaaccagttttattgagaaattcagtagtttttggtctttggtctgtatgtatatcacataggggtttggtaaaagtctagattcccacatccaaacccaattctcttgtgagcattttaaacgaccatcccaggtggttctggaatgctcataggtttgcatattagttacactatttatttgctgcatggccttggacaagttgttttaaccctctgagccaacatttcctcttctatcaaatgggaatattaataatacttagcccttggagacattgttagaatttgaaggacaatgaataatttttaagagagcttgacccatgagaaaaataaacttaaatgcatgaatatatatatcaagcatgaatttacctagtgcatatgcattatacactgggtgcataatattttataaaataatccttgttttataaagtagtgtttcattatttggggagaggcattaccgtcatttcctttctgttgacttcccctcttcagagttttctactcttcccctcccatcccaccaccttgctttgtcacaaaacaaagccaataggatcaccaacagtttaagactggtttactcaaaacaaattcattattttacatagctgaacatagaaatggtaaataatgttctataaatatttgttggttgacagctttggaacaatgtcctctagaaaaagctgaacgtagccacccaccttgtatgagagccacaaagaatagccatgtgcctgaatatgtgtcagccgctgtgtgactggaggggctgaggaaggggcgtagagggtgttgtgaagtcccttctgacaagcagtcaagaacgcatagaaatacattacaaaaattaaatagtctagataagttgaaatgcatgttaagaagagtcccagagtgtggttgcttgggtaggggtaggttcaggaattgaagggacgtccctagggcctgggtccctgcttcctaatctgccacaaacgtaacagtgtcttgttgcttccaggtcactcagggatttgactctgagatcaatgatgcacttggcaccagaacttggtggggttggcacagacatgccagcctcagccactttcattctggaagctgttaaaagagacagttataaaaattgaggaatcagcaagggaattcctggtcccatgctgccttcccatctctgtcttggcaagcatagggcctatccacttgttcaagattctttgcccaacctcagctccctagactttacctcagtggctcaggcggtctcctcaggcagcctcctcctgctaacacttcctcctctcttccctctgccaggggcagctcttccctggttccctgcagaccccaggtcaggccagaaaacacctctatggcccttccctgtgtcccaccaccagataggacctcaaaggcctggggtccccaggatggccctcaaaccgactggtgcccttgcaggctgccaccctccaagtcctgcttctctccagagatgggcagaagcaccagccctcgcctggcaccagcagtgagtctcataattgccatttaccattttgctaggggggcttctgggggtcctaggaaaagcagcagatgcctgggtgcttggggacctgggcattctgagggaaggagcagcgtgaccctgagtcatttttcactggggacaagtgagccaactccttctacccagtgataaaatcagaaggaagtagatggagacagcactgttcaggggatgatttggggatgagaagaactggcaggaagttggagatttgggggtgagaagaaccagcaggaagttggggatttcttgtttccccacttttcccttccatttctgtttgagccttaggtttggcctccatctccctctgtagaaattgcagctagttagatagtctgcctcttattccagctctactgggggaacataatatggtctaagaagaaatttttccagcaagaggccatctctgcaaatcacctgtgaggcagacctgtggcaattttatgactcagctggccaccaggaagcgattgtagctgggttctgccccttattgaaacctactcaatgttctccttcactaagtaggacaagaccgtaccctgcctttaaggtttatagaatagaaagtgaaaacactttggggaagaaaatcttcctgaacagatagcccagggcattttgaaaatcccttaggaagttctctgtttcacttgggtacctctgtccctggactttggcgatgtggtttgaccccagccagagagtgcagggaacaacagcaaaaggcaggacaaagactgactcgtgagaggaggcccaggaacaggggggcatcgtgagagaggaggacgtgagggcccaagagtgtgagcagaagaggataggacttgggcactcagtcaccagctgtggggtctgagctgtgtccccttctctaaagaggtaagccctgagtcatgggaagatggaaaccggggctcatgagacaggatgttttttaagcaccgtggtgtcttgttgacttgcacatgcaagggggtcttgggtaaccacagggctcagggtatttgcaggaacagttcaagtgctcacttgtcttggggctgtttgtggggaagtggtttccacagcaacaggaggtgagatattggtgttaccccagaccacacttagctacttccttctcactaaagctctgtagtcatattttccctggcagagcagaaacttctctgttatcccacagctgttctaacggtgtagacttgacttatgcaatgatgccaggagtcctgagcagcacagcccaacttcaatcacacacagatggacagagctgtattagcaaagcctgagctactgagcgatgagagtacagccaggctttcagacatctgttcattcaagagagatatgcgctaagccaaggacctaaagatgtgtttaatatgggtgctaatatgcataaggaaccttgaaataaatgttcttagcctttggccaagagggtccatgtctaggaatctattctccatagaaataaattcaaatatggaaaaaatgaacaatgcataagtgtatttggtccccagcatatttatagcaacttaaaattggacccaatttaaattgcctatgatatggaaatggctaagaaaattatgggatcttcccttgattggctattaggcagcctttacaaacaatgcagtgacatgagaaatgcttatgttatggtaagcttaaaaaactcaagatgcaaatcagcttattttaatcaggagccacctagcatttgggatgtggtcaatcccacataatgtatttttgtgggtgcagttcccaggaaagaggaggaataaaaacggcaagtatgaagtgtctccttcgcttgcagtctccttgtctacccctttgtccatccactatgaaaggactcccttctgttccttaatatggacaatttctattgaggactcattgttctaagaattgtctcatctcctcctgcatcctcagtgcccgatctttggcttctatgaaggaaggtgggtagtgcttatggcagggccagttctacctttctcagtatgttctggagtgggtatgtagccccattttctagtggttaccttgacatcatgaagagtttatgtctcttttgccctagatttgggcaatagtcattcattgggcaactggaaataacacaagtcagcatctcattaaaaataaagtcattcaggaaagtggacgactaatagtttctaatctagagagcataggagaagaaatgtttaccacacacaaagtattagtgccttttatatcatcaagacaaaaataacaggaaaaagacaaacacattatagtgaaaacttgtttttcctgaccagcatctattctgcatgttccctgatgccagaaactcacatttcttcagggcaaacccccttccccaccattctcaggctttaagtttatgtaaaattcagtaaacccaaagattcaagttatgtgccttgattaacttaagcaaatcaatgaaacccatccccataaccacagcgactggttaggaattcggttcctaagtcagtcaaatccaaaagggcctagtgatgttttttccaatgggaacacagactcactcttccctgcagaaaatgaacaaggattcatgtacactggcaggtactggcagccacccagggcctctcacaggaaagggagatcagaaagagaagcaaagaggactcatgagataccacagggccgctgcgtccagccttgcctggagctagggccacctcgatgccctatagtcttggagccacaaggtgcatttactcaaagcctctttgagtttggtttgcttgtttgctttctgcctggaaactgccagcatcctgagagatacgagatctgcatctgtgcagagacacagggtttgttaaaagtcacaggccctgactgaagtgtggaactggctgaaatgagaaagtaggaggtaatttggtgaggaccttgtgaaatggaagtgagttttaaaccttacatgcatcagaattacctggagccttgtgaaaacacaggttgctgggccctagtctattaagaaaggaagtggggctcagaatatgcctttctcccaagttcccaggtgatattcaccatgctgtcctgtctgggcactaccttttgccatacccattacaaggtattgcacgtgctggttgaactatggtctgtcttattttggtgctaaaagcctgtgccaaataccaaggctgcagcattaaggaatttgttagaaaagattctgaatattggaatttagttgctgtgtattatatcagtaaggtcctttaagaaagagtttaggctactttgaaatgggctcatctgaaattgaaaaagaagaaatgcgacttgctaaaaaggcccttccagcctgttgactgagaatccagtaatctgaagactgaaagggctgtaaatgcaggattttctactctaagataaagttagcatgagcagagacaggaagatgagagacataatgaggccaagcgtcaaatattcatcacctccacatgggccaagatgcaggcagaggtctctcaccaggggctgggaggtcggggtgacaatggtagtgcagtctgtgctagaaagtgcacatccccagctgggcgcagtggctcacgcctgtaagctcagcactttgggaggccaatgctggcggatcatgaggtcaggagttagaggccagcctggccaacatggtgaaaccctatctctactaaaaatataaaaacttagctgggtgtggtggcgggcacctgtaattcagctacttgggaggctgaggcaggagaatcgcttgaacccggaaggcggaggttacagtgagccgcgatcacgccactgcactctagcctgggtgatagtgggagactccatctcaaaaaaaaaaaaaaaaaaagaaaaaagaaaatgcacatccccaaccccagttaaaatgcaaatgcaaactatgtaactgacaacctgtctgcttctggctacctggcccatggaattgatcagaagcaaatagtagcctacagacattagaagggagtcacattgccaaagaaaccataagactggttccaaaaagttgctgattgcacaatacctaaggcaacctcaggctaactcacacagacaggaagtcagcagcctccagaaagcagatcctccacattgcacatctcagattgtccatagaggacattctcccagggaggagagctagggactgccagatcagctgaactgcttaaaaatgcagtacccattctccagttccctatcaggggtctttgttcaacttactgtttgttcataacacttgtatttagggaatgttgggcatgattaaacttcgtttagctttgggtttctagaccttgagaaacaattcagtgcaggcaaatattgtatgcccctatattttttcctgaaagccaataaagaaggaatgatgacaccttcactgcgtctatggggacaaaagctgcttgtgtgtgtgtgtgtgtgtgtgtgtgtgtgtgtgtgcgtgtgtgtgtgtgagagagagagagagagagagaaacagccttgtcaaaaagacgtgtttgttgctgtaccctcattatatgaaagccatcatggcatcaaaacagtataagccaggttgagctctatcctctctgcatcaactcagaatccctaccagaaagtggttgtgatggatggaatatcacccatcaaagaatagggtaagatgagaccagagaggtaagctatgcaagctaatcagaaaataactcaaagttttaaaagtgcagaatataaaaaggaaaaaccctcattcctaaaaaaaaaaaaaagcctcatttcctcaaagaaatcagttagctatttgatgtgtatctttccaaatatttgcctatgtaaatatatatgtatatatggcatttaaaaataaaacaaaataatatactttacagatagttccatagcatatgtagagaatatatatgcatatactgaatgtaattaggtctgccttttacatataatattatggacactttccacagttatagatgtgtgctactttttttttactgacttcagaatattccactgatggacatcttaatcctctactgattaatcccctactgatgactgtttgcatttctttgctgtttgccaaccacactgcaaagaatatcctcatgtctacatatcttatcttttggcagtgtttctatgaagcagattcctagaaatgggatcaggtcaaatgggatgtagttcacatagtatatgcattttaatatttgctaagtagtagtgtttatgctttaaagagttggaacactacaattctaaacatgtttggacacaaaaaatagattatttgaaacaaaatgaaataagcatagctcgtaaaaattaacacgtttggttttcacacaaatattttgaatttctctttcttctgcaaaaaggaccctagcttagtatggatttcttgtacagataatgcaaacaatccatctattaaataacttacctttcacagtaaacctatagacagcatcctgctccacacagaagctgattgtcttttccttctctaacattagctatttattttgtagagtgtagattctagagaaataatgtataatacacctgttgccatatgcagagacttaccacatttagaaaacagtggtgaattctattgacagtggctctcagtcattaacatgctatggaacacctcatgagcttgataaaaatatcagttcccaggtctacacttaaagatcctatttaagtggcttcaacaatcactgctcaaacactctatgtcaactcagaatcctgacaggaagtggttgcaatggataaagtatcatctgttaaagaatggggtaagatttgagtataggcgggtcatactttgggaaataacttggtcaatggttaacagcatagtctgtagttcaataaaagtccagttttggaacacaattgaccgtttacgtgctgtgtaacctcagccaagttgtctaacctttctgagccctgggttacttttctgtcaagtggaggtattaatagtacctaagctgtactattgcattggtaagattaaatgagcaatgtataaaaagcgctcagtaggaggagtaagcctcaacaatgtaaataattgctattaagagcttgattcatcatgaatatgccctacagaatactatgcttaatggtggccattcgagtagtgaattctcctagagcatgcatgttatgatttgagttataacatattcgtagtttcaatgttccagaactgtgtctccgttgtaaagtggataactctgtggtagccctccccatctctcccaatttccctccatttcacctcttcctaatctttgcctatgattcctcttaaccagtgattttgatttgccagaaaaacaaaaccaaactcaatactggtttaccttttaaaagagcatctttattatttccccaggccgatcacagccctgaacaaaagcatccgatacacatttgtcagtctggtggctttggtgccatgactgcctacacaggctgatgacagccactcggttgtcaccagacgcggtgtgagggaagggggaggggacaggggaactctcagagcaaacaatcacaaacacactgtgaaatcgaaaataaattacaaaaactaaatagtataaataaattaaaatttaagttaagaagagtcccacagtgtggctgtttggcaacaaccagtccatagaagaggtagctgtggaggtcacacgcatgttcccaaggctcaggctcctgctcctccccactgggcccaccgaggtcgctgggcctcgaagcttctggacccctcaggcactcagctccaggtcgctgacatatttctggacccactcctcactggggtcagcacagacctgccggcttcgcttggttaggaagctgtggagaagggaggaagagttaagcactggggaatccagcaggggaatcctgggcccaccatggccccaccattctgctctctgtcctgggcagctcagggcttgctcctctttcaggggccccctgcctatctctgtctagagagcttctctcagtgactcagtaggggtggccctcagagtgtcccgctgcctccttcttcctgtccctttcctctgggctggggcagcccttcctgactctgtaacacatgcctcactccagctccaagtcaggtcacacctcggagccctgcgtcctgtatccccgataggctcctgaaggctgggcctttccaggatagccttctggcctgtctctgccccaaccctgaccctccctacctccatagaggtgagcaggaagactggcacttacatgacaccgggcttggagcactggctgctcgtctcaaagtagtcagctatgaaattctgtggaatctgccgggaggtgtagctgaagcagcaggcggtcggcgtgtcagcagcaactgtggagaaaggaagagaatgagcccgagtcacagctcagaagaaaaggccaggcagcttctgatccccgagcagttgaggaaggcaggcttgctcagaccaagtgactggaaggcatttgggcatttttgctgagaaatgtctctttgtttctgtctgtatccttctttctccttgactcttcatagtgggttctctgtttctctgtgtgatccagatacctgaacggactgttctcttatctcagttctcttcagggaattttgtctggttcaagaagtcataccccaacccaagagaagccttggacatctctcataagacatccaagggacagagctcctgggagacctagagtgagctggagagtgaacaacataccccactgggaagtaagcagccctggattctgcctcttgctaactgattcgtttcgaaccctgtttttctatctgtaaaagggactgtaactcccctgcccctgcctagattctcatacctggagactagggggctaagaccccttctagagataaaaataaaagtcttaaagagaaagaccaagatgtttggcagccctttaagaagttctcttttctcttgggggcttttaggccacaagaaaagattgatgtggtctaaccatggccagagagtggtgatacccacaacgaaactcagactcacgtgatgcagagaactggttgcagagagccatggtgcagaggaggacagcaagggcagcagtggagacctgcatgattctgagcaggtgacggaatgtgggctcgagtgtcagcagagccaagaaaggactgaccactgtctgctgcccgtgtccttctgaagtctgaaaccagctctcctctttataggcagccctggcggatggggaaatggaatctgggggtgaggagggaaatttttaagcgtagtgatgctgtcatgctaagttgcacaactcagggtccctggtgaccacaggggctcaggatatccaagaatagcatctttgagctattctctaactctcagctctcaactcatgacttgttatagtttcatagggaaatggtttctcctgtgagtgtgaagaggggtatatgtcaacccaaggctattcttagtcagtcccttctcataagaactggtctgtgcatgaactctccagccccattccttcccacagagctgcaattctgcttcctcagctgctataaccacagggatagggttgatgggctgatgctgtggagggctgcacaacccttcctcctcccagaggcaaagaactgaatgaaagctggaggaatagaaagcatgaggtcatgtttcagtcatttgtctatttattagtcatgtagtgactagggcgctgtgttaaacgctagttgtggatcataaaaatactttagaggtgggtgtcaatatgtcaggtgcctagaaatatctgtagccattaacctagaaaaagcatttctaggaaagagttctgtggaaacaacccaaatatggagccatcttcaaacataaagatacctgacccagcatcgtttataactctaaaataaacaaagctaaatttttctccatcagggaatgataaattatccactagatcatttattattaagtctctaaaatgaatgaagtggcataaatatgcttataacatcagtggttaaaaaaagcaagatacgacattatacaaattctacaaagtctgaagaattgtacaaatatatatatatatttgtactatatatacatgtatttgtacatatacacatatatatttgtacaaatatatatatattccttgccaaccctaagcatggaaaaaaatacaaaggcttggaaatacatgccttaaagaatgaatagttcttatatttgtgtgataggtccctgggtgatttattttcttatttttttctttttctgaatttttctcattttacttagttagactttattaccttcttggtcagcccacaaatttataaactaatttttaaaaaaacatttccaacatcactggttgaaaaataggttgttgtcagttgtttaatctgaaagaaattattgataaatatgctgaagtttctgttcaatggttttggccaaaatgaagtcttgatttcccatttctttgaaccattttaaggatcctatactatacttacataaatcatgccaaattgaagcagttttttacttattcttttcaatacataatttcagtggtgtggaagggtctctaccttctcagccagattatatgcttttttttcttttccatactttgttattttattctttcacaatcaatcagcatacctcattttataatgagaaatagatttagttggttttaatgatctttgtttctgagatgcccctgatctcgtgggggcaggtagagtgtatgaacaggtaattgtagcatttagccgaaagtgctaggactcctagtagaaaaagaaatgaaagctcagaatcccacgaggggaagaagtgaccttccaccagagggttggggaaggcttcatggaagggatggaactttagttgtgtctggataactgcccgggatttaggcatctatagatgagtgcccagctgaggcagagtcctgagtgtgacattgtgggttcagaggaaagagggggtgcttcagtggagctgcagagcagtgggggtgaatatggatgataaagctaaattgggaccaaaccaggacaggccttgtattccccccaaaggggttagagttgatacatttgatgctggagaataacagaggacagaagccaagtgcgaccatgcctttggaattctgtcctttctaagtgtctgtagacttaggtcttttaatacacatgggctctgtttccttcccaccccaatgatggctagtgccagtcttgagggaggagaagcagaagcaagatcaggggccgtggtaggtttcaccggagctttggcatccatgtatcttcccctattgctaccaattccaaataaaggtatctctgccacttgtatcattagaaacctacatcacaggcaatgcctccttctcaccccaccctctgcctcccagctctcagtgatacccagaattgcattccctcactcacttcttaggggaaccccctccatactcgtgattccatttctgagagctggcttctgtgagttgtggagagtgagaaaaggaaatggaaactgctgaatcagtcagtgttctgataagggacatcttctatctctgtcattacagcaccgtgtgttataattagttatctatgtaatttgctcttcaaaaatctagaccatgccctgttgattttattttagtttctttttctcaagaaatttatagtttaataaaggcaatgtgggagtttggaaacaaatttttatttcacgctaatgatagattagcaactacacaaattttagttcacaatatgtaatttttattgagtgatcaccatgtgctgatttccataatagggattcacgtttgaactgtcttcaaaacaaccctatgatttagttaccagtatactttctcagttgaataggtgaagaaaccaaagtaaatagaggttaagcaattttccgaaggccgtaaagctgatgactagcagagcagggattcaaatccaggtagtctgactctaggtaccacacgctacacgtcctgtaccacaacttattatatttgatcctcacaacactcctataatggtagattttttagagtgtcttctcagattgtaaaccaactccagaccatgtcttgttggttgatttaaaccaaatcctagcacatgatgattataacatgatgagcctcgtgacctagtctctatctcttattattgtgttctttataataaagatgatttattgaatatataattctatctcagtgtttatatatttgtaagactttctctatcaatccccaaaccaggaactatccctttgccatgtgttttgcttggattgaaatatagttacatgcacagcatgtgcttaatttatatacattgaatgaataatataagggagatgtaggacggggttgagttgggagggtcttagacatttcctaggtggtaaattgatgttcccagttgaaatgacgtacccatggtcatgtggatggaattggtcagttttatattccactatctgtgttagctaccagtgtatctccagtgataatcacaatgcttgacatatagtgaagcataatagctatttgatgaataaataaatcactgatttgactaacaatatgtgttatgcctgaactctcactatggagttgaaatactaatgggaaaggtaggataagaaaggccatggtgagtggaaacggggagagaatcaggaaaaataactaatgggtactagacttaatacctgggtgatgaaatcacttgtacaccaaacccccatgacacaagtttacgtatgtaacaaacctgcatgtgcatccctgaacttaaaataaaacaaacacacacatacacacacacacacacacagaatcaggagagagagtcagaagtgtgatgggtctccatagccaaggaagaatctttaaataaaatgagaattgaagtggggcatggtggttcacgcctgcaatcccagcacttttggaggccgaggtgggtggatcacctgaggccaggagtttgagaccagcctggccaacgtggtgaaacccatctctactaaaaatacaaaaaattagccaggcgtgttggcacatgcttgtagtcccaggtacttgggaggctgaggcaggagaatcaccagaacctgggaggttgtagtgagccaagatcgcaccactgcgaccagcctgggtgatagagcgagactctgtttcaaaaaaaaaaaaaaaaaaaaaaaaaaaatagaattgagtgtcgtgataaagatgcaattagaaagagaaatgtaaacttatataaagaagttttcagtaacttgatctaaaaggttatgatttgctttaaaaagaaaggaaggaaggaaagaaagaaagagaaagaaaggagaaagagaaagaaagaagaaagaaagagagagaaagaaagaagaaagagagaaaggaagaaaaaagaaagaaagcaaaagaaagaaagagagagaaaaagaaaaaagaaagaaagagagaaagaaagaccatggtgtcacagtcttgatctttgggaaactgaccacccaagattccttaggtggtggtgacagaaagtagccagcagtcaacaccatggacccttcagcatggagggatttgatttgtgtcccagcgttctggctcatttcagcctctgcgaggccccacctcagtccagcagagcgtcccagtccgcagtgcggggaatcctggctgggcagtttgtcctctgcggcgtctttgccttgcactgctcagcttgcctccccactgcgtgctgctgcccatgctctctagtgcggcgcattgctttccttcagattctggccccgaggccccacttccccaagtgtcaccctctgctatctcctttggcagcaggcaccccagggatgcgttcactgatgatgacaccctctttggcccagctttggcctcctttcctcatatgtggtctgcgtggtcaggttgcagcaggtgtgggccccacctttcatgcaggcagaagcagcagcctggagtcccctgtctagtatcttagacagacaatgtctcattgacacagccccttctttctgcagccagccctttgtttcctgtcctgagtccttgttattttctctagccatttcttgcatgtgtgcagtaggtcagggcgtatgtcttggtactggatctgatccctctcccggtcccttgccccttcttccatattctctatgcaataaaaagtgcctcttcctatcaatattccaagccggaaagttgagagtcacccttgtctcctctttctctatcatttcctatacctattcaatcaccaactctagtctacattcaattttacgtgcatctgtctctcaccattcccactgcctctgtcttaggtcaggttcttatggtttctcaccatgacaactagaagatggtcttagcaactcccttccctccctccttccctccctccctccctccttcctttctctctctttctttctttttctttctttctttctttctttcctttctttctctctttctctctctctcccttccttccttccttccttccttccttccttccttccttccttccttccttccttccttccttccttccttccttccttccttctttctttctttctttctttctttctttctttctttctttctttctttctttctttctttcttttcttccaagacaaggtctcattctgtggcccaggctggagtgcagtgactcgatcttggctcaccgcaaccttggcctcccaggctcaagcaattcttgtgcctcagccttcctagcagctgtgattacaggcatgtgccaccatgccctgctaatttttttgtatttttcgtggagatggggtttcaccatgttggccaggctggtcttgaactcctggcctcaagtgatctgcctgcttcggcctcccaaagtgctgggattgattataggagtgagtcaccacgcctggcctagttttgtctctttttaatctatcccaccacacagcatccaacataattttgctaaagctcaaatcagtctctgtttctctccttttaaaatcttgcaaacattctacattgcttctggcatgaaatggaagcttctctgtaacctgacccctgtctacctctttggccttgtggcttgccaagttgagacttcctgaaaaccaagacagcctatttgcactacctgtggttccttaaatgtgcagctttcttccctgcttttaatgaaggaggtgttgacttggtagagcacagtttccccttcttgtaagccacaaggcagagtgtaatactacaaaagtgggcacatcccatgacagctgcagggattaatatttagaacaattaaggaaaaacactacatcattccccaaattttctttactttttctttttctttttttttggatggagtctcactgtgtcgcccaggctgcagtgcagtggctcaatctcggttcactgcaacctccgatcccacctacccctctccccgggttcaagtgattctcccacctcagcctcctgagtagctgggattacaggcgtgcaccaccacgcctggctaatttttatattttttgtagagacagggtttcaccatgttggccaggctggtcttgaactcgtgacctcaagtgatccgcctgccttggcctcccaaagtgctgggattataggtgtgagccaccaagcctggcctgtaattccccacattttctaaggaaaagaggaaatccatggatcttgctgttcaaagacatgcaaaatgcaaaacagaaaagacattttacattagaataacagaaactttggctgttgtgcttttaacataaatttataatacagcacacttcccttttgtgatttattcatgctctagagccagacttcttggcttcagcttcaaatctgttgtatgtcagctgtgtgtttttccataggttacgtacctctctgtgcttcagtttcttcgtgtgtgaaaggggatagttacagcacttacctcagagggccactgtgaggattaaatgcattaatatctatgaaaggcagagaacattactggttcataaaaagtgctgtgttaagtgctatctactattattactattactattttattattattgcaatatttcaatatatccattttacatcaaaaacaagtgcaggtctcttgttctttgcctggatacccctgtgcctgtctttgcctggctaatctcagttcaacctacaatagagaaaagttagagcaacataaatggacagatgtgaatagcagagtgattaaatacaacttttggtatatctatgcaataaaataccatgcatatattcatgccatttttgagtaatatttaagtttgtaatgacacagaagaagattaagtaacaataataagatacactggttcataaaagactattaagtaccaataataaaatataaaactaggtacagaatgatagggcaattttaattttcttatttatgcctccctatattttctcaattttgtacaatgaccatgtatattttctataaaagaaaaccaaactaatataatttttttttttttttgagacagtgtctcactctgtcacccaggctggagtgcagtggcgcgatctcggctcactggaatctccacctcccagattcaagagattctcttgcttcagcctcctgagtagctgggactacaggcatgtgccaccatgccaagctaagtttttgtatttttagtagagatggggtttcactatgttggccaggctgttctcaaactcctgacctcagatgatctacccacctcggcctcccaaagtgctgagattataggcatgagccaccatgcctggcctataaatttttttcaaaaaaaaaaattcaggtctcacattttttggaggccttccttaacactacactaccaccatctaaagtgcataccctcaccctcagacacaatgcctgtcacacagtagttactcaataaagctttactgaattatgttcatctcttgctggagtattccctatgacctgcatggaaagaggccagaaacaatttgaaggaagatgcttcacaaggaatactgaaagttttcttgacctcatgaatgctggtgaggctttatccctctctcaggaatttagcattgcctgaagttcctgacctctgcctttcacaagcaagagcaggttgtggcaggcgacgaaggtccatttccatggtaagaagcgtggggctggccagctccgtagtcagagtgtgacagtcactgatgagctgctccaaccagctcattgtcctacagatttcatcctgaagaattctgcactctggataattgtgtatttgtttcttcaattcacaatccagcttctgctcccatttcctccaaagtgacttggacaccatattggcaaaactacaggatttgcctcttcttggtttattatcttggcaaaatgaccctatgttccagctccccttgggtttccagtctccacatttgccctccaggggttctctagttctatgcatcccacctcctagaggctacctcttggccccaacacccagtggtctcctcaacactctaggagaagccaggatgtccagattgactgagtgtgttatgatcagagattgcctctatgtgtaatctcagaggctcatacctgtagagggactctggtcatcactgaactgggagttgaagaccctgggtcttgacatgcatcctgtgtgaccttgatcgggtcttttcacttctctaggttttgctttcctcttctgtaccgtggcaaaacagattgggatcaggtaaaaccacaggccatggatatactgaggaaaatgaaaaaataccaggacattttcaaggtcatgttactgctgtggctgctgggcctgtctgcagcctgggaggttgaggacaacatgacaagacaaatgtaaaaatgcccagaatggagttatgaatatagtggtggtcaaggatgtggagggggaacctctaaatgaccacaagtgagggggaaagaagggcttccctgctcagggtgagggggtggacctctgaatggagctccctggaaccaaggatgacccttgctgtcacttcttgcaaccctgagctaaaaacagttgagtccaagaatagtatccattgtgataaaactactggatgcgtgggttgagggtgggggagaaggggaagtaccacactatcagggctgaggaatcaccttttgggtggaatgtcagaacacccagttcattcatacttggtttactcatttggctatataggggtccacatcttgagtccatgttactcatcacattccctccatggagataagcataaacagtttctgcatcaaggagctcactttctagttggggaggcaaccacaggaatagataaatatgtcataggtggtaagaagaaatagttcaggagactgtaggagcacagtgaaggatacagagtttacttgggaaagaggtcaggaaagtttctctagggaagatgggaatctttttcgtcatgtatctgagagtcatttgttatcattgattattggctctccttggctttccagtctccacatttgccctccaggagttctaaatggcaccagtgcctaaatcttggggtgggggaagttaatatggctaaacgaaatgatacaagtcctttttactctcagtgtggacttccactggtgcagacatagtattgttgttaggatcttcatgaagatctctcaaaaccttttacccccatgagccaaagatcagatcaaggcgaggaaacaaaagtcaacagacaaactcattgtatggctcagtgatgactaatcacccattttatcaatcattattctcctgaagccccagaacaggcttcctcctaacccctccaccctgctcattcagacagctgctttagtggggattgagacttaacttgaaactactcatctacagctaatagacagccttctccatccttcagccttcctgacactttgtttcttcctctgacatgacacttagcttattcctcctcatgggatagttatttctgtcactgtcaatgccatcactagacatggaactcttcgagggcagggatggggcttcattcagctctgtctgccctggcaaagagcagatggttagtacattgggttgaataaaaatgtcatagataacgaagtctgtgttaatccagaggacatgagacacattctgcttcccttaaagtgaggtcctcgatgcatgaagatgaaactgcaccaactaggaaaggccaggagaggtactaacacatctgctatcagggaactcggaacattacagctgggggcgagggtcttggagaagatcagaacatttgaaaaaagagctgtacaaagaaaagggggagagaacagatgagagaagtgcagcttgtgtgtgcgggtggggagtgagggagagtgctgaggcaggatgaccttgtactttatttaatgaccctgaagtaccccaggatgctgctccaacctctcctatggctcccagatgctgtgggtccctttttttcttaacttgtattttaggttcaggggtacatgtgcaggtttgttatataggtaagttgtgtgttgcggggggtttggtgtacagattatttcatcacccaggtaataagcatagtacccaataggtagttttttttatcctcaccctcctcccacccttcacccttaagtaggccctggtgcctgctgttcccttctttgtgtccatgtgtactcaatgtttagcttccacttataagtgagaacatgcagtatttggttttctgttcctgtgttagttcgcttaagataatggcctccagctccatccatgttgctgcaaagggcatgatcttgttctttttttttttttatgactgagaagtattccatgatatatatatatatatatcccaaattttttttatccagtctaccatcagtgggcatttaggttgattccatgtctttgctattgtgaatactgttgcgatgaacatacatgtgcacatgtctttatggtagaatgatttatattcctttgggtatatacccaataatgggattgctgggttgaatggtaattctgttttaagttctttgagaaatcgccaaactgcttcccacaatggctgaactaatttacattcccaccagcagtgtataagtgttccttttctccacagcctcaccaacatctgttattttttgactttttaaaaatagccatcctgactggtttgagatggtatctcattgtggttttaatttgcatttctctaatgattagtggtgctgagcattttttgtatgtttcttggccgcgtgtatgtcttcttttgaaatgtgtctgtttatgttcaatgcccacgttttaacggagttgtttgttttttgcttgtacatgtgtttaaattccctatagattctggatattagacctttgtgagatacatagtttgtaaatattttctcccattctgtaggttatctctttactctgctgataatttcttttgctgtgcagaagctctttagtttaattagatcccatttgtcagtttttggttttgttgtgatttgtttttggcatcttcatcatgaaatatctgccagatcctatgcccagaatcatattgtctaggttatcttacaggtatcatatttttatagttttatattttaggttttacatttaagtcttcaacccattgtgagttgatttttacagatggtgtaaggaaggggtccagtttcaatcttttgcatacagctagccagttatcccagtaccatttattgactgggaagtcctttccctgttgcttgtttttgttaactttgtcaaagttcggatggttgcaggtatgcagcattatttctgagctctctattttgttctattggtctatgagtctgtttttgtaccaaagccatgctgttttggttactgcagccctgtggtatagtttgaagtcatggctccctttttttactcttcttttttctttctcagagaagagcaggtaacaatgtggggttaaaggtgagcaggtgggttagagtagtggagctaaaggcagatagaggtcttgatccaattatcctcattcccttcatttgtccaaccttgcacattcctgtatgcagggcctttgtaagcttcaccttctgtacaggtgcccagcaactgtcaaaccagccagggcttaacatgagcatgggcattccctatggactggctgggacacacccacatccttagattacacattttgcctgtaacatagataaactaattactaggtatataattctgtttcgttttgttttgctttgttttgtttttgggacagggtctcattctgtcaaacaagcgggagtgcagtggcacaatcaccactcactgcagcctggacttttctgggctcaggtgatcttcccacctcagcctactgagcagctgggactacaggtgtgtatcaccactcccagccaaaatatttttttatagagacagtgtttcaccatgttgcccagtctggtatcgaacttctgggctcaagctatctgcctgccttgacctcccaaagtgctgggattacaggtgtgaggccctgtacccagctcaatcctgtttttatactagaagaacattctctatctgggtcttccaaacttgattcttactggttaatttgtcctgttcttttgctggtccaagaaaatatcctgaaatctttatttcttctccgtttcctccttgtcctaggacagactagccctatccccttcctgaattaagtccgaatatagtcagtctttgagtgtggaatagctcctagcagtctatcagtcaacgggttctctttgtggtcacattctatgtttattcaggagactacagcatggaaagaaaatggactttggagtcaggtgaatcttgattcaaatcttggcagtgccattcatcagctctgtggcattgagcgcatcagtggaccactctctgatccccaattgccttgtctgtaaaatgagattagacacccctgctcaagattatggtaggattatatataatgtgtgtaacacagcttttccagtgcctggtacaaggtaagtgtccaataagaagttacaaatgttcctgagccaccctactgggtccctcctcacatccaatgctggactcttcatgcccaaggaaacatataaggcacaaaagtcagtggcactcagctcagcagaagaaggcacaggaaggggatgggggagtcctggctcccactttgttcttggggtcaggcttgtggccagcctggaaagactgacatgaaccctccagcatctgagggtgccaaccaccaagagcagcacagttcttgtctacaagccacttgtagcaggtgtgaacatttcatcttttcctctggggtttgcaactctctccccagtctcggtcactgcctttggctgtaccacttcccttttcttctcgcctgcacctccctcatctttcctctatgatgacatcgccctggggaagagaagctgagaggaactcctcactcagctagcttcaggagcatgacgtcatctctaccatggaaattccactcactctcctgtgcccccacatttgtcctaggcctcagagtccctataaagagagattcccaagtcagtatcagcacaggacacagctgggttctgaagcttctgagttctgcagcctcacctctgagaaaacctcttttccaccaataccatgaagctctgcgtgactgtcctgtctctcctcatgctagtagctgccttctgctctccagcgctctcagcaccaagtaagtctacttttgcagctgctatttcgagtcaaggtgtaggcagagtccttttttctagtcatggctggcaaacagtgggatctggggatgggacaaaaggcagctaggaagattgccatgtagtctgctgctaaatgtagagtctagtagatattcaataacattcaagttcctattttcttaagaattagcaaccagcagaggaaaacgatgggctggaagtcagactgttgaattggctctgcctttaattatttgttcaagcaagcccctgtccctctctgtgccttggtttccccatctgtcatatgaagggagtgcgatgtgttctgagactgaatccagttccaatcttctagatttctttctcgttcttctctgaagatccactattcaaaataagactcctgctcatgttaggtgggaatggatatttggggttctggtagctccacagggatgctcaatgaagatacaaaattagaagtcaaaataaacagctcccacgggcagtgttgatctcaccctggcctttcctttcagtgggctcagaccctcccaccgcctgctgcttttcttacaccgcgaggaagcttcctcgcaactttgtggtagattactatgagaccagcagcctctgctcccagccagctgtggtgtgagtatcaacccctgggctgccctgggaggcaagggtgagggctggattttaaaagagggcctgttttggggagggggtgattgagcattggggaggcagctcccagggctgaagccttccctgagagcagtgaggacacaggtcatgaactcacttttcaagtgctgaaggcggcagagtgggagccgagagagaagggggttgctggggaggaagttattcagaggacagggaagcaggggaaggcagacaggtcccatgagatatggaccgattccttaaaccgtgctagaaagacatgtggaaaagtcactgccaggctggcagggaatggggagatctattcatattgattgcaatgccccttggttcctaatctgggcaactcctggggcccacagctaaatccagtgggtggaagttacagggagtctgcttccagtgctgctccaggaaggatcccatccaccagagctgccccacatggaccatggtcaggcagaggaagatgcaaaggataaagccagatgacctcaaaggtctcatgagattctaatctgtccgctccttgttctacagattccaaaccaaaagaagcaagcaagtctgtgctgatcccagtgaatcctgggtccaggagtacgtgtatgacctggaactgaactgagctgctcagagacaggaagtcttcagggaaggtcacctgagcccggatgcttctccatgagacacatctcctccatactcaggactcctctccgcagttcctgtcccttctcttaatttaatcttttttatgtgccgtgttattgtattaggtgtcatttccattatttatattagtttagccaaaggataagtgtcccctatggggatggtccactgtcactgtttctctgctgttgcaaatacatggataacacatttgattctgtgtgttttcataataaaactttaaaataaaatgcagacagtttctttgtgattttaatttgatttgggggtaaaaggaattgcctggtaccattgggagggacaaactacagtttcccaaaacagtaagaatgagcaattgctgagtccttaatatgagctctgggctgaacactcttaatacacgatctcactgcgtactttcaacaagggttttaacacccttatgaactagggactgttgcaccgagtttcacagttaaggaaacagaggcacagagaggtgaagtgacttgctgaagcttgtaggcctgcttggggagtgtcatgaaagaatgccccagaaaaggaggttatcatttcaacatcttgtggggggagttgtaaagaggggaagcagcacagcaaaggcggaagaagagtgagaagagtgacttcatcatcttattattattataacattgggaaagtcatcttgccttattagacctcggtgttcacaagtgtgaaatggggataatattaaccacttcgaagggctgttataaggtgatgtataaagcacccatcataggaccaggcacctggaagtttctctccttccctctctgagcttcagccttttcacttaaaatggacctagcaattgtcaggatcatcatgaggattagattagttagttgacagatcagcactctaaatcccaatctactgtgaagtgttgtcatgaggacagcaggatggaggttttgtttggaagtgttgcaggagtaacctaaagccacttctacttaattatccttcaatcagaactgcctattccatgggtcagacacaacacaactctgaagtagaattacatgcacaataaagcctgatccatgggacacagactcgtagtctactaaagctaaaaggaaagtttagaccatctggtccaaccctctcattttatggaaactgagggccaaggcctgggaagtaacttgccacgtgccactcagcgagtgcatagcagagcaggagcctggccaatgccagctcccaggctcgggccctttcctgcacaccttccctagtgacgcatctctgtggtcctcaaaagggagaccggttgagtaagaacaaggcggagactatcttgaaaatcatttgagtgttcttagtcctatgcaaaagcagaattggggccctgcacttctctggggtcaacagacacaattcccttccttgtcctgcccttagtcaccctcatcattccagagccccagtggaaacttctttcagattctgcggggactgagagaaggaggttagggggcagagctgatccaaaacaggtgtaggaagaggctagcagcaaagaatgtgcctggccatagtttctgctttcatttgcctagatctgagctgtctaatatgttagccactggccaaagtggctatttacgttttcattacatttaattaaaatgaaataaaatttaaaattcagttcctgagtcacactagtcacatttcaagtgctcagtagctccatgtggctagctcccatgttagacagcacggattacgggctttctgtccatcattgcagaaagttctgttggagagcagtctcctagaatgttctcagagcctaaagaaagtgaagggaaggggagttgggatggcctgtaagattagagtgtggattttgagaaagatatgcaattctattctgaggcgacgggatgggagagagaatggatgactccaggccagagacaaggtatagatcactacggtagctgaataatggcccccgaggtgcacacatcctattcctcagaacctgtgaatgtcacttttatagcaaaatggactttggagatatgatcaagttaagaatcttgagatgagtgattaccttgaattatttggtcaggccctaaatgcagttgtaagtgtccttataagggggaggaagagaagaatttggtaatagaggagaagatagcaatgtgacaacagaagcaagatgctatgctgctggcttggaagatggaggaagaggccaggagccaagaagtgttaggatgcagctctagaagctgcaaatggcaaggaaatttttcctcccctagagcctccaaagggagtgtggcttagtgaaactaatttcagacttctcacctccagaactttaagagaataaatatgtggttataagatgttaagtgtgtggtaattttttacagcagcaataggaacaaatacaaccaccaactgacgcgtcactgatagcggcccccaatagctcagtgtggcaggaaagggagcattctagagggtgagccaaacctccctgcaggaggaacccagggtgagagggacacacctcaaggagatgaactataatgaggagaggcatcccaagaggagatctgcttcagcaactgagttctggggctgaggcttgatccagggtccaagacccttaggaagcatgcctcttcttgagacatctagggtgctctgaggggtcctggattcctgtccgggaaagaatccatcctctcatctgtcagatgcagcccagagcagagccatgacctgtctctggttcattgttgagcaggcaaggtcagggccagaatctgggtcttctccctcacgatggagtccctttcccaatcctccctgcccctcagctaatggaaagggaggagctcagctccacagaggcaagaccaccagggaaggctgcaggaggcctgggcagcctcatgaagaaatgcttcaccagcaattacaaacagcagaatggaatcctcgaagtggggcaatgtgggacttcacctgttgcacaatatgagactgtttttttcctttctcctcttttcatacaacttccttttctcaccctgggcccagagagctggaatctgcttacttgacgttccatttgaggtttctccaggtttccgggtggggacagaagccagaacagatgaagcaggacactcgaaaggaactatggattatggagcaacttctaggcatccggcctgttttcctactccttgcagtgcccacctcccccagctcactctccagatgggagtccatttccttatgtacatgttcctttaggacatgttcatgcaaacatgtcctcatccccctatcccacctcaacctggaaccctccatcatgctcccattgacacaggcattttcctccaaggaggccaggagccgagcaagcagaggcagggatcaagggagcaagatgagctgaggatggtgacatagccacagctcttcctcgaggctgagaccagagaccaggtggcagtcctgtactgcagtctgcattcaccctttacagacttgagggtcttggcgccctctctttcccacttatctctacctgttctcccttctaaactccttctctcttgggttcccactgagtctagcatacaggaaaatggaagaaaagaattgagagacaaaatcatggcacatttttctaccttttaataagtttcatttttggatacagccaatgcctcgtatatgtgggttccacatctgtggattcagtcaacaatggatggaaaatatttgggaaagaaagcacaacaggccagatgtgatggctcacacctgtaatcccagcactttgggaggctaaggtggatcatttgagctcaggaattcgagaccagtctgggcaaacataacaagaacctgatcctacaaaaaatatcaaaattagtggggtgaggtggcacatgcctgtagtcccagctacttgggaggctgaggcaggaggattgcttgagccccggaggcagaagttacagacagctgagatgacgtgactgcactccagcctgggcgctagagcaaaatcctgtctcaaaaactaaataataataataacaaaatacaaataaaaaacaatgcagtataacaatgatttacatttacatttattaacagcacttacattgtttaggtattctaagtaatctggagatgaaagtatacgggaggatgtgcataggttatgggcaaataatatgctattttatatcagagatatttgtgcatctgtagattttggaagccatgggaattcctagaaacaatcccctgtggatatcaagagatggctctatacgataagtgtgtaaaatatatatattcagaaggaatcagaaaatcaaaattaatgtctctcagggaagatgggcttgatgggacttgatggaggatggtctgggagactatccccttctacggaaacattccctactaggagaccagcacagctgcagggaaataatttcttcaggcagtgttagcagcttctaaatctcgggaccctatgtccctgggctcctcaaggagatgttggttatttacagtgactcctgattcatttccttagggggtcctctcttccttcagctagggacttgaaggggaaaagtgccagcatttaccaagctccttaaagcgccaggtgctatactgctatgagtttcatatatagtcttttttaatccttgcaaaatctcaggtatggtggcatgtgcctgtagtcccagctacatgggaggctgaggcaggaagattgcttgagcccaggagttctgggctacagtgcactatgccaattggtgtccacactaagctcggcattaacattgtgatctcctggtagcaggggactaccaggttgccttaagaggggtgatccggcccaggtcagaaatggagcaggtcaaaactcgcatgctgattagtagtgggatcgtgcctgtgaatagccaccgcatttccacctgggaaacatagtgagaccctgtctctggggaaaacaaaaaacaaaaaacaaaaacaacaacaactacaacgacaaaaaacctaaggtagatattattattcccattttaaagatgagaaaaccaaggctctgaaaggtctagaggtagatccacagtgtgaggacactggtatgtgtaatctttgcagacctatttgatttatattagctcttcttttctgtaacctgcctaaacaggtctaccttggcatagtaaacctctttgccttccatcctacctttctatatctccttgatttggaaggttggaagggcttgtcttgttctcccccttcatttcttgaaaagagtgaatccctgaatctttcaagctgtctgtagaggaagttattatatctgtgactccagatgaagtctgcagattcaaggccctacccacccattagaacttctgacagatgagcgcccaccaaggagtttgatatcatgcacttaatggtttttaaattaataatttttgaatagataacagtagacattatatacaattcaaaaggcataaaaagatacccaaccagaaagtaaatctccctcctagctctgtcaccaaaatatctgttacccagggtaatgtctatgtgacctaggtaaatttctacgccactttaactctgcttatcttcagaaaacaggatgcctgaggtccaaagttccccctcgggaccaacagactaagactgctggggtctaagatggcagctcacttgacctccgatgaacttgtaacttcattataatctaatgtccatgctaaatgacactcccaccagcaccatgacaattgacaatctccatgacaacaactgaagaaaccataagaggaccaaaagaaaggcaagaactccaattccaagaagctctccacccattctcagaaaatacatgaatattcctccccctgcttttaatgcccaaccccttcattaaatatatcctattatctgtgatttcccggctctctgagctaagaagttgatttgtgagccaggctcctgcttctcagttccctggctgtgatgttaatcaatgtcaacttgattggattgagggatacaaagtattaatcctggttgtgtctgtgtgggtgttgccaaaagagattaacatttgagtcagtgggctgggggaggcagatccactcttaatctggtggacacaatctaatcagcttccagctaatataaagcagccagaaaaacatgaaaaggagagctgggcctagcctcccagcctacatctttctcccatgctggatgtttccttgtgatcgtgtaagttaacacttaataaatctcccctctctctctctatatatatcctatgagttctgtccctctaagagaaccctgactaatacagattttggtaccaggagtggttctagagaaacagaatattaaggattgagttctttcgttggttttggggtttctggaattggctgcttaatatggttagaccccaaaatgctaaggactgtatgtctaatagtatggagaagactgatagtccttggtgtgaacggtttagatagttaggcaaaataaatgcatttgacactcctgatttcactgctcatgagaggcaaggagtttagtgactctatacataatacctttgaccatatgcggagaaccaaggaacataatgaagctggttggttgctcttaagttcagtatacaaagtgttgaaagaaaatgatgaactcagggattgtctcccggcttcagaaatagatactaagcttcaaatctgctaagattgccctgagtgagaaccttatctcctgtacagaaagagctgaaattgtagaaaaacagacacaagcttttatcatgcaagtggctgacctgcaacaaaaggggcatgcacagcctcaccaggtgtctattgttaaagtgggggcattgattggaaaagaataggaccctgcaacttggaatggggaaatgtgggagcacccagatgaagctggggacactgagtttgtaaactctgatgaaccttttttgccagaaggaacagcttcccaatccccagtagtggcaacatccgctccctgacccatgctgccatcagcctttccacctttgtccacagataaaccctgtgctgcctgaggcaacagtgatggcctcccctgaggcagttgccaggcaaagtaatgttgattcccctcaggagccacacccaacacccctgtttgctggcccactacattgatgacagtctagacatgtaactacactaaattctggtccattacactgatgacagtctagacctgtaactaaagtcccagtgggcccctggaagtgagattgagagtgtgacccatgaggaggtgcatggcacttcaaaagaactgtttgagttctctaatttataaaaacagcaatctggagaacaggcatgggaatggatgttaagggtatggggtaatggtggaaggaacatagagttggatcaggctgaatttattgatttgggcccactaagtagggattctgcatttaatgttgcagattggggagttacaaaagattctaatagtttatttgcttggttagctgaaatatggaataaaagatggcccactgtgagccagctggaaatgcctgatctctcctggtttaatgtagaggaagggatccaaaggcttagggagattgggatggtggagtggattagtcactttagacctaatcatcccagtgggaagggtccagaaattaacatgtctcctggtgcctggtatgcaccaattgacttggcaaatgctttttctccattcctgtccataaggcccaccagaagcaatttgctttcaactggcaaggccagcaatatacctttactgtcctacctcaggggtatatcaactctccggttttgtgtcataatcttattcagagagaccttgaacactttttgcttctgcaagatatcacactggtccattacaatgatgacattatgatgactagatccagtgaacaagaagtagcaaacacactggacttattggtgagacatttgcatgccagaggatgggaaataaatctgactaaaattcagggaacttctacctcagtaaaatttctaggggtccagtggtgtggggcctgtcgagatattccttctaaggtaaaggataagttgctgcatttggcccctcctacaaccgagaaagaggcacaaagcctagtgggcctgtttggattttggaggcaacacatttgggagtgttactctggcccatttattgagtgacccgaaaggctgccagttctgagtgggatccagaacaggagaaggctctgcaataggtccaggctgctgtgcaagctgctctgccacttggaccatatgacacagcaaatccaatggtgcttgaggtgtcagtggtagataaggatgctgtttggagcctttggcaggttcccataggtgaatcacagcagaggcctccaggattttggagcaagtccctgccatcttgttcagataactactctccttttgagagacagctcttggcctgttactgggctttggtggaaactgaacgtttgactatgggtcatcaagtcaccatgtgacctgaactacctgtcatgaactgggtgttttccaacccatctagccacaaagtgggtcatgcacagcagcattccatcatcaaatggaagtggtatatatgtgatcgggcttgagcaggtcctgaaggccaagtaagttacatgaggacatggctcaaatgcccatggtctccactcctgccactctgccttctctcccccagcctgcaccgatgggcctatgatcagttgacagagtaagagaagactagggccaggttcacagatggttccacacgatatgcaggcgccaccagaaagtggacagctgcagcactacagcccctttctaggacatccctgaaggagagcagtgaagggaaatgttcccagtgggcagaacttcgagcagtgcactttacatgaaatgagaaatggtcaggtgtgcgattatatactgattcatgggctgtagccaatgacttggctggatggtcagggacttggaagaagaatgattggaaaattggtgacaaagaaatttgaggaagaagtacgtagatggacctctccgagtggtcaaaaactgtgaagatatttgtatcccctgtgagtgctcaccaacaggtgacctcagtggaggaggagtttaataatcaagtggataggatgacccattctgtggacactactcagcctctttccccagccacccctgtcatcgcccaatagacccatgaacaaagtggccatggtggcagggatggaggttatacatgggctcagcaagatggacttccactcaccaagactgacccggctatggccactgctgagtgcccaatttgccaacagaagagaccaacactgagccctcgatatggcaccattcctcagggtgatcagccagccacctggtggcaagttgattatattggaccttttccatcatggaaagggcagaggtttgttctcactagaatggcacttactcctgatatgggtttgcctatcctgtatgcaatgcttctgccaagactaccatccacggactcacaaaatgcattacccaccgtcatggcatgccaaacagcattgtctctgaccaaggcactcactttgcggttaaggaagtggggcagtgggctcatgctcatggaattcactggtcttaccatgttccccatcatcctgaagcagctggattgatagaatggtggaatggccttttggagtcacaattacaatgccaaataagtgacaatagtttgcagggttggggcaacagccaatccaggcaggactacaaatgactcagacccttcaggaatgaaggtttgggtcactccactggaaaaaaaagcaaaaacaaaaacacgacctactgaggtgcttgctgaaggcaaagggaatgcagaatgggtagtagaggaaggtagtcatcaataccagctatgatcacaagaccagctgcagaaatgagcactgtaactgtcatgagcatttcctccttcttttgttaaaaacatgtttgtgcatgtatagacttgtacgaagaaaatatcttaattttatttccttttcctttattatgtgacataatatttattggcttcatatcagcatttaagtattgttcactttatgtaatagtatttgggttggtattggtgcctttccagttgtacaatggatagttgtattatgttacatgtaattatgacctcattattgtctttatttgaagattatgtatgatctcaggagatgtgtatgggttcaggttgacaaggggtggacttgtgatggttaatactgagtgtcaacttgattggattgagggttacaaagtattaatcctgggtgtgcctgtgggtgttgccaaaagaaattaacacttgagtcagtgcactggggaaggcagatccacccttaatctggtgggtacaatctaatcagctgccagtgaatataaagcaggcagaaaaacgtgaaaaggagagatggacctagcctcacagcctacatctttctcccatgctggatgcttcctgcctttgaacatcggactccaagttcttcagtctggggacttggactggcccttcttgctcctcagcttgcagacagcctattgtgggacctcgtgatcatgtaagttgatacttaataaattccctttatatctgtctatctctctatctatctatctctctatctatcatctatctatcatctatcctattagttctgtccctctaagagaaccctgactaatacagtggccatggaataaagcctgcactacttgacactcacttttggttttgtatattggcttcacagcactaaacggggaaagactccatttgtatggggactggctttgttggtaacatatccatttccctttcctagaagcaatgaataattgctaccactattttatgaacacatctggagattccacagccttttagaagtgtcagagaatggaacaacaaatgcaataacaaggattgcccaaatgatcagggccttaggcttctagcctttatcctgaaagtgctttagccctctcctcctagaggcctagatttacaaagctcttgacagctgtgctctgggacaaattgaattctgacataaaacactttcttgagatttgaaaatgctaccttttctcccctttactctgttccctaaacaaggggttgctggaaacatccttggtaagtttcataagattgtctgtttcatatgatgcttataaatttcatagtcaatgactttgttgtgcaaaaaaaaatgtaactttattttctccataattaaacttagcttttcaatctcgatttcttttggtggcagaaatttaatctgaccaacaaggtaaacaaagtttcttgctgctgtttttttttccaactgagaatcttccgtctcccatccttcttcctcttctcttctccagctcttcccagggtccctctgcattctggaaggctggagagtgattgagcagtcaggagatgcaggattctcactcatgattgaccctgacccctgctagccactgatgaggtgcatttcaactttctggtcactgccggctcacttgtcctgccatgtcctcctgggtcagggctgtgactctgtcccctttgtcccaccctaagcttctctgagccttccaggccaggggctacttggaaagactggtggtgttcccaggcacacctccctcctgctcccctgcacctacagtcctccctcttcccaggcaggatggacgccctattggggtcattctcagatgtctagctttctggctcacatctttcactttattctcccatgaatgtctatctgattttctctcagtatgtgggaagctagttcttaaaaattatcattaattcaaaaaatgcatatattactaatggtatcatccttatccccattgtctttgggggtttaaccttaggagcaccttctccctcccacactcagatcctttcctctcaaaaagtccagatcctgaaatgcactttcagaatgattatgtctgttatgagttaaaaaaaaaaaaaaaaaaaaaaagagtactgaggaactcaactgacttgtttgtttaaactctattcaccctcccctgcaggcagtgagcatggatgatgatgattgctggcaaaacaggggagtggtagtgaaggttagaaagccagggactggggacacttgtgctgccagggtgttctctgagcaatgatgctgcttgtggtgaattcccattcacctccagaatgggtttctggctttgctgagaaaggcttttattgggtgtcattagtaattctgtcaaaggtggtggggaggcggggaaacttcccatgctaagaatcaaatcaagaaaccctttctggggaataatgagagccacgttctttctaatgtgatatgaaagcactgaatatttgttactgcttttacagaaatgattaattctcaatctatgtcagagagattctcagtgctgattttcagatgatggcattgggaaataggcatcactgcatgaagttgctaccccttgtgcaggcctccctggtggcctgtgtcattgtcgtgggcttcaactgctagattgtgaactgccccccaccgcccccacccccaggggtggatcaggtgctggaaggcagggtctgcagggtggccgtggagaggggtgtggtgcagctgaaaaggaataagctccagggagggcaggaaaagcaatgagatcagctcagccaaatctagtccagccacagcttttagctggagagcattgacaagctgtcccaggattaaaagggggttttgtgaagaacatcacttgggtgagaggctcataggcatcctgcaagaccagctaaaggctacataggaattacagcaagctgcagcaggatggcctccagtttcagaagggccacgccaacttggagagcgatgcatctgacccagtacattgactgaacgaaggaggcaaaggagctatgtgaggagcccacagaagaggtcaccaaaaagggaaatgaagctgtagcttccagacacctgagtggaaaaaaagaccagagtcagcagctccaagccaaaaatagaacacaagctctctttcaagtaaggtgacagtggtgcttgtttattcttgagtataattttgtgtgaaaaaaagcagcctgtaggaagagtccctcttccactgtgaaggagaggctggttgcaggtagagaactctgtctgggttccctctggagttctcctcttctccacacatggggtagagcgctgtttccagcctgttattcctattctcactggtacccactgaatgactatgtactgtgcactcccgattctgacaatcaatggtctagaacagcagtccccaggcccaggccacagattggtactggtccatgacctgttacgaaccgagccacacagcagaaggtgagtggtgggcgagtgagaagcttcatctgtatttacagccactccccattgctgacattaccacctgagctccgcctcctgtcaggtcagccacagcattagattctcatacaagtgcaaaccctattgtgaactgcgcatgccagggatccaggttgcacgctccttatgagaacctaatgcctgatgatctgtcactgtctcccatcactcacagatgggaccatcaagttgcaggaaaacaagctcagggctcccactgattctacattatggtgagtcgtataattatttcattatatattacaatgtaacaataatagaaataaagtgcacaataaatgtaatgcacttgaatcatcctgacacaatcccccatcccttaatcagtggataaattgtcttccatgaaccctgtccctagtgccaaaaaggttggaaccattggccaagagcactgacttttttttcttttatttcagtagcttttgggataccagtggtttttgttacatggatgaattataaagtggcaaaatctgagattttagtgcgcctgtcacctgagtagtgtatcttgtacctaatgtgtagttttttttccctagcccccctctcatccttcaccttttgagtctctaaagtgcattatatcacccgtttgcctttgcatactcaaagcttagctctcacttataagtgagaacatacggtttttggctttctgctcctgtgttaattcatttagaataatggccttcagctacacccaacttgctgcaaaagacattattttgttcttttttatggctgagtagtattccatggtgtatatataccacgttttctttatccactcattggtcgatgggcacttaggttggttctacatgttagcaattgtgaattacagagcactgttaacacagacattattagcaagagttttaaacaagtctaaatacaaagctgtttgtgcaagatttttttaaaaggctacgtgtataataaccctgtcattttagtgtactattaagttatttagtataatagtgcaatattaagttatttgtaatttgaagatttctgatctatacatactttgcttcctatgtgtgggcaaagcaaaatatgctctattaagtacatattgccaagaaaagccatgagtgtattaggcttttgataaaaatgggccaaaaatgggaatgcttgccacagagcacagtgagggagggagagcattgtgagatggatttgttgtggagagatctatgcctactttactaatagaataaaagaaagttaatttctattgatggatttatacagtgttacaaatcgggaatgtttagaaaggcaagaggaatacaatgattgtttttgccatggtttacacatttagcttgtggtaaatgactcacaaaactgatttaaaaatcaaaggttgatgttaattttgaaaatgactatttacgacacgggcaaagacttcatgactaaaacaccaaaagcagttgcaacaaaaaccaaaattgacaaatggaatctaattaaactaaagagcttctgcacagcaaaggaaactatcattagagtgaaaaggcaacctacagaatgggagaaaatttttgcaatctatctctctgacaaagttctaatattcagaatctacaaagaactcaaacaaatttacaagaaaaaaacaaaaaaccccatcaaaaagtgggtgaaggatatgaacaaacacttctcaaaagaagacatttatgaagccaacaaacatatgaaaaaagctcatcatcagtgctcattagagaaatgcaaatcaaaaccacaatgagataccatctcacaccagttagaatggtgatcattaaaaagtcaagaaacaatagatgctggcgaggctgtggagaaataggaacacttttacactgctggtgggagtgtaaatcagttcaaccattgtggaagacagtgtggcgattcctcaagggtctagaaccagaaataccatttgacccagcaattccattactgggtacatgcccgaaggattataaatcattctactataaagacacatgcacacatatgtttgttgcagcactatgtacaatagcaaagacatggaaccaacccaaattgccatcaacgatagaagggataaagaaaatgtggcatataaacaccctggaatactacgcagccataaaaaatgagttcatgtcctttacagggacgtggatgaagctggaaaccatcatcctcagcaaactaacacaggaacagaaaaccaaacacctcatgttctcacttgtacgtgggagttgaacagtgagaacacatggacacagggaggggaacatcacacaccagggcctgttagtcggtgggaggcaaggggagagagcattaggacaagtatctaatgcatgctgggcttaaaacctagtggatgggttgatagatgcagcaaaccaaaccaccatggcacatgtatacttgtgtaacaaacctggacattctgcacatgtatcccagaacttaaagtaaaataataataatttaaaaaaaaaaagaaaatgactatttaatcatagttcccaatgaaaacaatgacatttggtttgacttgagttggtttcgaagatttacagtaaataggctcttaccacttgtgaatgactggcaagtttgcactaatgactttcttccaatgaggctctctacaggaaaagtggaaggatccacgcagtttgagatgcaggggcctctctgggcttcagagaggaaatggagcccagagaagttatggagcatccagttggtgagctgtagcaccgggattcacagcaggctgtgccacctccctgtgccctgtgaccactgagagcaggccctgtttgcacgcatgtggcgatctccaatttcagtgttctccccgtgatatctctttacccagtcactaggatttaatgtttccactcagaaaaggcaactgaagaagagtgtattagtgagggttctctagagggacagaactaatggaatagctatatatataaagaagagtatattcaatattaactcaaatgatcacaaggtcccacaataggccatctgcaggctgagaagcaaggagagacagtctgagttctgaaactgaagaacttggagtctgatgttcaagggcaggaagcatccagcatgggagaaagatgtaggctgggaggctaggccagtctctcttttcacattttctgcctgctcatattctagccatgctggcagctgattagattgtgcccacccaggttaagggtgggtctgcctttcccagcctactgactcaaatctttatctcctttggcaacaccctcccagacacacccaggatcgatactttgtatccttcaatccaatcaagttgaccctcagtattaaccgtcacaaagagtacgaatgcagctctataaaattttctctaaatccttttccagcctccttttgtgtcccagtcttggggatgatatgaattctgtcttgctttccaattaataatgtctctattcatctcatgtttaattagtgcacatggagttactgagaaataaaatacgctgttagttcaactaaaaaaaaaaaaaagaaagtaggagagtgagagaaatattacctggcacatgctttaagtaacacagaaaggcaaacagccccacctgtgttaaaggacttccttgggcagatctttgccatctgactttttaaatttcactgtctctgacctttcaaagtctcatgctgggtgacactatatcttggtgcccatcctcactttctcatgaaacaggacaaagatgtaatctgatcaacatctggggctggtgtgcagttaggcgttggaaggatttgacaggaataggaagtgattatctgcaatataaaattccaggaaaaatagaattccagcatattcaggagtctaaacacagaagccattgcatgcctaaggtcccacaagccagcctgaaaaaaaagcaatgaaactttgatggctccagatatgaaggatgaggtttgtggactgaggacatccagggattcccaacgtctgctcagtcttctcttaattttttatacatgtgtgacggctgctgtggatacctagccctttcaaatgatatgttataagaccttgccaaatgcccaaatttgtgattgtcagcagagctctggaaatcttttaatgggaacactgttttgtttttcacaaagaaatagagcttttatgaagtcggtagagcgtctgctcattcccgcatgcaggaacagcatctgggagctttacccaaaccccagccttggagattccacatcagtgggcctgaggtgggcttgaagcatttgtaaggtgtggacttcctttgagcttcagtttcttcatttgtgacatggggattccaatggaaatgaccccacaggctagcagggcttcagggagatgacaggtataaaatgcaagccgggggcctaacctacaagtgcatacttaacaaaagtcaactgttgtcattatcattccctccttagcaatactgcagctaagtgattgaaatgcatgcctcagcaaaactatcacaggccatgaataccctatgctgcatattggaaactgcaaatgctggagaagcaaacgccaggtgctattgtcttacacagtttctgctaattaatttctttatctaattgttgtgagagttatttgctcgatattcgcaattggggtaggtcttaagcctactcccttttccagggggaaaagggaagtagctttcaagaatacaaagcaagaaatagtccactaaaaatttaacttgggaaagcaaggtaataaatatattgggctaatgtgtgagaaatcggtgtctccttcactgtgggtggaagtgtaagttgatgtagtctttctggagaacaacttggcaatatcttcccactgtacagtaggtacatcctttctattttcacatataggcattctggggaaatactgatgtatatagacaaagaagcatgcatgaaatcatcagtatagtattgtttgtgatagcaaaaagactagaagccacctaaatgtgcaagaattggagcttggataaataaaatatgagccattcatatgatgggatttttagataacagggtttttttgagatggggtcttgctctgttgttgctcagactggagtgcagtggcatgatcatggctcacatagcctcgacctcccaggctcaaatgatcttcccatttcagcctctcaagtagctgggacaggcgtgccaccatgcccagctaatttttaaattttttgtagagatggtgtctcactatgttgccctcatggctggttttgaactcctgggctcaggcagtcctcctgcttcatcttcccaaaatgctgggatgataggcatgagtcaccacactgagctggcacttatttttttaaaaaggaaaaaaaagacactaccctggaaagttctccaagatataacattaagtaaataaagcaaaataatacatataacttcatttatgcaaaaaaagtaaattttgtatacacacatgtgtgcatgtaaaagcataggaaaaggccttagaaaaacacacagcaaactgctaatactgataatattaacgacctcccagtaggtcattctgcatgtctatattgtttgaattgttcatcacacgagttcattgatgtgtttcttgtataaaaattaacttttaaagattatgttacctaagttaacatgatcctatttaggtcacttttagagaggggcatgggagccctcccctggctgacagtgctccagagggtcctcctgcaggctctttggggctgttctgcctggccccactccctcaccaaggccaggctactcatcagcctagaatccaggcagccactttgcagttggatttgggcttgccctttgctgtcctctgtgctgtctggggacattgccctccgtcctgtactgcgttgctgacacaggatttttcagagctgcgtagccagctggagacctccatggctggtgatacccctgcctgggcctcacttggccccgggctcaccacaggagctacctcacccactcggcccagcgggctgtgcttggcttgtgctcctgcttggatcctgtgctcaccgcaggatccacactaagcctgcaggtgggcttggcttgccacaacctgcttccaccttgggcaccaatgtctggctgagaggaatgcaatggtgcatgaatggggatgcgagcaaccctaaagccccagagggagtgttacagcaggctaacagctcttttagtcccattgtcccactccaatccatggctccagggctggcctggctccagcactgcttcctgtcacatggggcggttgccttccaccagcagagggcagagaaccacagtgttatagcctttgttgtacttgcatttggcaggtcccaagttcttgtcccacatccaagaagaatgaggttatgctgacaaccaaaggatgaggagagttttattgagtgacagctctcagcaaagagaggacctaagagggcagtcccctctccaaagttggatggtctcttcctgactgaaggtgggcagtcccccagtgtggctgagtccaaggcttttatgggctcagaatggggtagtgtgtgctgattggtttgtgagtatgcaagaaaggctaaaacaaaggcaccactcaaaggtgggcacagcagtgtaaaaaatcaattagggaagtgtaggtatatgtaaaataggtgaagggtggggatcaattagaggaaagtgtgccaaatgggaagagaggttcccagtctggtctatggatttatctaagactcgtagcttggctttcaggctttaaaccgtctctggtttgaagacggggtttcactggggacccacccctgtctgcctagggatttgtctgcctcctgtagctatcactgctccatctccaggtgccctggtcccttcttcagactgagtcatccttcctgggtgcttgcaaatttagcacctccaaagattctgagatgccaatgtgaactaactaccaggggtgttcagtctgagcccttctcttggcttgcctagtatttctttgctgctagggtatattgtcttgtccaggccccccatagatggtcatgagtgcttgtcacagctccaaccaccaatgacaaagcaggctttgtattcgtctccttcttcttcttcttttttttctttttctgagacagagtcttgctctgttgcccaggctggagtgcaatggtgcgatcttggctcaccacaacctctgcctcccgggttcaagcaattctcctgcctcagcctcccaagtagctgggactacaggcgtgtgccaccatgcccagttaatttttgtatttttagtagagacagggtttctctatgttggccaggctggtctcgaaatcctgacctcatgattcacctgccttggcctcccaaagtgctgggattacagacgtgagccaccgtgtctggcctcacctcctttgactgtcattggggttttacctccacatctctttcactgagattctgtaatttggggaggagagagggcaggcatcctactcaggcttgtgtggaacatttagtgttcttctcttgttattttgttcactctttagctcactgaagcagcatttcctctaggaacctctgagtacaaagcagaggtcagagaccaccaggcatcagggtagactctgtctctcaaccttctaggccctcagccagcttgcaacctttgaacacccatcttctcagggagtgacttcactacccacctgttactgcccctgcagttaagcggcagcccgaatttcatacctgcatagggatctcagctggggggttggtcagcggcttccaagcacactttcaacatctctcccagaagctcttcaaatcctcttgtcactgaacctccaggaggccccagatggcccccagcacactacacctggcttcatagcttacgcattcactctgattttctaaatgacacagagacgattcatttctttggccacttttcctaaaggtaccaggaacatccatgccttgttgggattagcaaagtgctaaaaagtgttcttaaatgtctcatgtttggcgattacatctccaagaaaccactactgtaattagagagaaaccagctgtgagatagaacaggaactggctcacctgggggcactccctggagacctcgtatttgtgtatacttcctgccctactgtttctgctctgccttcctttctggtgacattgagggtacaaattgttccaggtgtgtgcagcacatcaaagcctaactggaagaaggcacagtcttcattttggtggcttttatcaccatgaggatgaggtgacctgtgctcacagtcctcctttcaggatcgaggggagcagagaagtttccaggccgagccgtaggcctggggatcatctgacacagaggcaggctgtgtccccactgcattcatcagacccacttcctttgacctacaagagggatcaccctgcattttccatccttctcatcagattgggttgggtctgaccgaagttggatgtggagagtagggtcactcctctaggtgggggatgtgccctccatgtgggaatccaagagggagcagctctgaggtgaacacaaggtatgtgcagggtgggaagatggcttgctctgagcagagattttataatatcttcttatgagatggaaagaagggggttatgacaacgcaaatttcattcctgccaagactctacagacttcagagcagagagaatattctcccaagggccagactgtgaaaatggggaacttagagtgagagtggaattgaagaagctgagggaagaacacagaagcgtgaaggaagaaatgggactcctgctgacagtgagggctcctcattggccagcagatcagcatgctggtattgctggtctctccagcccaccatgacgttatcgcatcattctgactctgcaggacaggcacagctgctgtcttccttacagccgaagtcttcctcggacttagtgaggaaggaacagagcacaaccaaaaagctttccatcttatagcccaatgtcctatgtcttgctctatttggttcattaaatctgattcatccagactatcttgtgaagtttgtatctttctttgacatcagttatgatcctcagatgtcttggaagcccccaggagctcatgctcccctggagatagcagcttctgtggctactcaaatgtaatttaggggaaaggctaaaataagtgaagtccttacttgtgcccttcctggcaattttgatgggggatggggcataccacagaacagcccagcctctgtctgtggtaccctgaggctttcctgctccaggctttagtgccccttcctatgccaaaacaaacatgccaggatttctccccaggattgctcacaatctttatagccactgttcggggttccagggaatatccaaagaagctatgagtaacctcatgacgatggaagtagagtggccttgctaactgctgacctccttctccaggaggaacggttacacctgcagttgactctagctttaacggctgagagaataaacacaggcacacctcattttattgctacctcactttgttgcacttcacagatactgcacttttttacaaattgaaggtttgtggcaaccttgcattgagcaagtccatcagtactattttttcccaacagcatgtgtttactctgtgtctccagtaattctctcaatatttcaaatttttcattactattatgtgttatggtggtctggggttagtgatctttgatgttattattgtaattgttttggggtatcacaaaccatgctcatgtaagacagtgtacttaacccataaatgctgtgtgtgttcggactgctccacacaccagctgttctcccatctctccccttctcctcagacctccttattcccttaaacacaaaaatattgaaatgaggccaatgaataaccctacaatgacctctaagtgttcaagtgaaaggaagagtctcacatctcttactttaaatcaaaagttagaaatgcataagcttactgaagaaggcatgttgaaagctgagacaggctgaaagctaagcctcttgcacctgagagtcaagttgtgaatgcaaaggaaaagttcctgaaggaaattaaaagtgttactccagtgaatatacaaatgatacaaaagcaaagcagtcttaactgctgatatggaggaagttcgagtgtcctggatagaagatcaaaccagccacaacattcccttaagccaaaacctaatcaaagccctacctgtcttcaactctgtcaaggctgagagaagtaaggaggctgcagaagataagtttgaagccagcagagattggctcatgaggtttaagggaagaagatagagatgtacaagtcgtctccataacataaaagtgcaaggtgaaacagtaagtgctgatggagaagctgcagcaagttattcagaacatctggctaagatcattgatgaaggtggctatactaaagaacagattttcagtgaagacaaaagagccttctgttggaagaagatgcaatctaggaatattttattgctagaaagaactcaatgcctggcctcaaaacttcaaagaataggctgactcttgctaagagctaatgcagctggtgactttaagttaaagccagtgctcatttagcatttcacaaatcctaggagccttaagaattatcctaaatctactctgcccatgctctaaaaatggaaaaataaagcctaaactacatcacatctgttgacatcatgattcactgaatattttaagcccactattgaaacccactactcagaaagaaagattcctttcaaaatattactgctcattgacaatgcacctggtcacccaaaagctctgatagaggtgtacaaggagatgaatgctcttttcatgcctgctaacacaacatccattctgtagtccatggatcaaggagtaattttgacttcctagtcttattatttaagaaatccactttgtaaggccagagctgccatagatagtgattcctctgatgggtctgggctgtaaattaaaaaccttctggaaaggattcaccattccaggtgccattaagaacatttgtgattcacgggatgaggtcaaaatatcaactttaagaggagtttggaagtttattccagccctagtggatgacttcagtggaggaagtcaccgcatatgtggtaaaaatagaaagagaactagaattagaagtggagcctggagatgtgactgaattgttgcaatctcctgataaaactcgaatgaatgagaagttgcttcttatggatgagcaaagaaagtttttttttttttttttgagatggaatctactcctgttacagacgctgcgacattattggaatgacaacaaaagactgagaatattacacaagcttagttgataaagcagcagcagggtctgtgagaggattgattccagttttgaaagaagttctgctggaggcaaaatgctatcaagcagcagtgtatgctacagataaatctttcattaaaggaagggtcaatcaatgtggcaaactttattgttgtcccactttaagaaatcatcggtggggcctggtggctcatgcctggaatcccagtatttgtgggggccaaggtgggccaatcacttgaggccaggagttcaagaccagcctggccaacatggtaaaacctcgtctctaccaaaaatacaaaaattagccagacgtggtggcacgtgcctctaatcccagctactcaggagggtgaggcgggagaatcgcttgaatctgggagggggaggttgcagtgagctgagattaagccactgcactctagcctgggtgacagagtgagacttcatcaaaaaaaagaaaagaaagaaagaaagaaaaaaaaaaaaagaaatcaccacagccaccccaacctttagcaaccaccaccctgatcagtcagcaaccatcaacatggaggcaagaccccccagcagcaaaaaaaaaaaaaaaaaaaaaaaaaaaaagaattgctgaaggctcagataattgttagcagttttagcactaaagtattttttagatataatactattgcacacttaatagtctataatgtagtgtgaacataacttttatatgtaaagggaaactaaaaaaaaaaaacgtgtgactcaatttattgtgatatttgctttgttgcagtggtatggaactgaatctgcaatttctccaagatatggctgcagttggataacttccctccctacgtactcttcctataacatacataattgtaaattacataagcccctttccttcccctgccacttggtggctggctgaccacaagagcacccattattcccttctctttctcaatgaacaggatcctgccttagtctaacactgctgaatgagattgtctgtttaattctgattcttaatatttgtaatctaaattttctaaaggtattagctatgtccttcaagtgagattttttatcaatgataaaggtaatattttgtccctcctctgctgactcctttgtaggcttctcatttggttcaaaactcaggcagtgataaaatggtgttattattgggccctctcaaaaactgaaagagtgatgttaattggtttgtaattttaatgacggctgccctttaaggtgggttctctttactagagccaataaattgatctcctggtatctggaatgttgccagctatacatctggatatttgcaattctaagcctaaatatcagaagcaaaaagttaagtgttttcaccttgcagggctatcagtatactttcgctatcttgcttcatggtcagttacttctgtggctcaatgacggaatctagattacagtgatgttaaccacttcaccatcccattgaatatccatctgatctagtacatttatggcattgtgctgacagggcctggagacagatgaggcagataccctagatgttttggcaggtcacattaatttcttgggatgaaacataaattttataaaaattcaggaaattactatctcatggaggttccccatgggagatgaagtatccctgtgatctaaacttaacaaaatattagctttgagttatgtcaagaaaaaccaatgtctctctggttgactcaaactgaaatttgtgtagctctgactcttggccctcataaaccaataggtctttgatacacaaaatgtctggagttgctcaggaatgctgtatagaaccggaaaaccctgacagaagaatcacagtgaaagcccctagggttttggagcaagttcctgttctctgtggaaagtacctactcttttttgtagaactagctaaaactctgaaaagactgaatgcccaaccattcatgtgtgacattaccacccatgtgagctgggtgttatctgatccacttagccatcaagtagggcatgtccagcaacaccccgtcaaatggaaaagctaaaagtgtgactgggcctgagcagaccccaaggcagaaatgatctgtgtgaataggttgctcacagtctctgtgtatttactcctgcctcaatgttatctcttcctcaacccatactaagtcctgtggtgagaggagaactctctccaattactcccagtattagttgattctggggcagggaggactgtgagaacatagcaccctttgagcatttgtaggagttcacagttctgggagctaaccaggcaaaaggtttttatgcaaataactgaaactgaccctacttattggaatgttaagagtagcatggaaaattgataggaaggtgtgataggcagcaaacaaaggcgtcgggcaatacagaatatagctatgtacatgtccatacagcaagaagactctgacatgtgccaatgctgtattaataccctgaatactcaccaccactgctggactcctggctgcatcagcactgctgggaatattcccaaactctgcctgcatattcgtacattcccttggattcaaaccctacctaatataatgcaggtactgctgcatatgcccctgtactactgaaaatccactcatcttgtccccaaagacagcccaatacttgctattttcattcagctccaagttcaggatctcctgatagtgcccacttcatctcttgttcttttgtgatcctgtactgatatttcatatcctatgaaatatactaaaagtcaaccaccactaactcacctagttataatagtgagaaaatgggagaagaaagagaaaagaagattaaatacagaaacatatacccaacaataaaaaatgaaatatgggtagatggagagtatttctgaaactggttgtgaggctgtagcttattgtaacaaattcctgcctccgcttatccaatccatgttccctttgccttcagccaccccctcgattgattggtgcaattttttctggtggaatgactcagatttttattctggaggagatctgagcccttgatgacccaacctgtacagagttatagacatctttcatgagcttatacacactgacacagtaaagcaaggagagaccccaggaataatctgagttccattcatactgttttttccacactgtctacattgtacagcagtagtgctatttccttttatagctgggaatagttgctaagtcaacagaacatccactttttagactgctggcaattttccaggctttaggcatgctctggtgaaatcgtaagcaaagactgctcttttgtactggtcatggctaccttttacaagtccatcagctgtttttcaattaacttcggtcttcctctcaggggaatcagatgattaagttgatcctcccatgatactctgtgctcatggaaaatcagagagctgcctctgccctgctcatgtttaggcatactgcacctccagttttgatatagggatgcctcctctccatggttacactgtggaacttatctataagactttctatcattgagggtcctgcctaaataaataaaaaaaaaaaacctggaatcttctactccaagacccccaaacatgaaggcagggtctagttataccccatcccaggactctggccagtggggcaagagtcaggagacagcactcttacaattacttctcactctcttgctcccgattgcatcttctcccaaaatatttgtatcttaaatttggatttttacaccaggcgaggtggctcatgcctgtaatcccagcacttcgggaggccagggtgggtggatcagctgaggtcaggagctcaagactagcctggccaacatagtgaaaccctgtctttactaacaatacaaaaatattagctgggcatagtggtacatgcctgtaatcccagctacccgggaggctgaggcaggagaatcgcttgaacccgggaggcagaggttgcagtgagctgagattgcaccacagcactccagcctgggtgacagagtgagattgcatctcaaaaaaaaaaaaaaaaaaaaaactttttttttttttttgaaattttaggagctacacatttgccaaccttattcttcggtcccatcctaaccatattcacctccaccagggaacatatggtagccacatatcttatagcctgaatggagccctggcacagaggaaaaagaatgtttgaagaaagaattatttgaatgtttgaatgtttgaaaaagaattattacacctccacaacaggccccatagtatttgtgtccttgcaaaacatattatctctgttctggggttctaacatccctcttcatggtcagagagatacatatttgtcttgaatctgtgtcttcagaagatcttcccagtacattgctgtgtgagtgttgtgtctgcagccccaactgcctgcccaaggaaaaggtgagtacaattgagtccccattcactaggggctcctatttaatctcacagcctctatatcctaggaagttgaattaacctggagggaagattctccacccacctggcataggttgcagatggattttacacaatgggaattggggcaggcagggttggaacatggcccaaagtgttgggggatcactctcctgtgacctgacacaggttctatgctctgtctcacagcctgagagagagaaagcaaattttagtccactttagccctactgcattgtcatcaaaggagacttcactcagcaacttgacattgggagggtggacgtcctcttcctttcagccctccccacccccagcatacagctacaggctgccgggctatcctctcacaactctcaaggtggttggcgagtttaggcagcaactgccagttaatagcagaaagagaagctaggaagagggaagtcaggggcccagtgtatgcatgtgtgtgggttggagaagggtgcaaaggtgataagagaagagaagagtggcataagggcttatgtttggcaccgttaagacttactgtgaacctgacatgcagagatggagggcctcaagagggtctttctcttggtgggatggttctctgatcacctgtccactccatcagtgaaggacgggtcccccactttaaatagtgtgagatggctgaacccatgacacctgacactgaagagatgagatgaatagcacatagaattagtgtcacctatactcacagcctgagggaggaggatactgcatgccatgcagtgacccacagaggttccacttgggagcagggtgaaccagcagaggctgtggaaggcaggctttgcattaggatggtgcaagggtaatcgtggtttttgccattaaaagtactcctgcaggaagatgtgattagctttttttgtgggctgacagggacttgagactcataggttaagaactgggtgggtgcagctgatctgataatagaggaactagccaggtggggagcctctcccactgggtggtggaggggggagcacattcaaagagcaggagaactcagggttagacctttggaccctgtgagaacttgaaagcactttaaggcagctcttgaagttttaggccttacaatacaaatggaccaaatgcctttgcctagtctctttctgtgggaatccagctttcccttgttgtagggatccctttgttcatagaaattatagggcagctggcagattttcatgcctaatagctgcccatggtacacattgaaggctgatttgcttctaaacaatactccaaccaacactcgtgtggcagggcaatcatgagtgcagggagagttcacatgtgaggacctggtaggtgggtagtagtggatgaggtcacaatgtggttggaacttgaacagtatccagtttcattcctaaaacaaccttttgaaataggtaggcacctggacctgccaaaaggaacctatggtatttgtgtcaacatgtgcccaggaaacaaatcctgtctaggggaaagagatgccaaagcaatggctgtggtcatgtgtgcaaagttgttcctgaaacaagtaaaagccagcccctgagatgctcccaggggaaaatgacacattggtcttccttaggataaccacagggaagcaggaattgttttgactattccaggacttttggccaccttatctgaactcttctgttgtcctggcttccctgaaccatgcttagaagcatgctaagcagttaagaagagatagcttgatcctggacatagctcagttgtcaatacagctgtccaacttccatggacttttgggcttatttcagtctgacaacagggtgggtggttggcgaggagagaaagaaaagggaccagcaatcatggggcagctgctatgtgttaagtgcccaaataacaaaaagactatgaaaaggtcaccatcctcaagtgctttcagtctagttagggagatagagccataaaacaaattaaaaagcacgtaacaagtgcacaaagatctgaggaagcagtgcagagcgagcaactttaccaagaagagtcttcagagaggaaataataatctgagctagatcttgacaaagagcaggagttaacagagagaagaggacaagccaggcagaggaagcaacagtcacatcaccctggatgagccaaagccatagagatttagagcatggaggatgtggcaagagactccccatagggtagtggcagggagtaatctgcaagaggaggatcaagacagagtctgaagcaccttaaacaccctgcttggattcgaatggggcaccatagtaggtgtttaagcagggaatggctcatgataaattctgtattttatgtcaacagcagtgatgaccgtgcaggcggaagcacagacctttataagagtagccaggtcacttcttcagaagattcttcacccatccccaagccctggttgttcttcatccttggagttacaagcctggaagaaatagccttattttaattattcaattttggaaatttccacaggctaacttttaaccagaagatcttgatcctaaaaactcttatccagaataaactgttctggcattatccaatctgagtctttatactatgtaaggtctctaaggggccctttctggactagcagcatcataaatagcataaaaataataaggcccatgcatgtagaagcaattctggggattctaagaagacaaagtccctcaagtcccttcctacatccttagtggcctctgaattactgccctctgtctaagggtgagtggggcttaccctctgcttagcctccacgggaagagaaagattgtatttgtgttttcacgctgctaataaagacatacctgagactgggtgaattattttaaaaaggattaatggactcagttccacatggctggggaggcctcacaattatggcagaaggcgaaagaggagcaaaggcacatcttacatggtgggaggcaagagagaatgagagccaagtgaaaggggtttccccttataaaaccatcagatctcatgagatatattcactaacagtatgggggaaaccacctccatgattcaattatctccccctgggtccctcttacaacatgtgggaattatgggagctacaattcaagatgagctttgggtgggacacagccaaaccatatcaaagatgtagggtaggctgtagggcagactgagggagcaccaaaaagtgggggtcagagctgggtcatagagaaggaatgaagaagtcggccgggtgcggtggctcacacctgtaatcccagcactttgggaggctgaggcaagcagatcacttgaggtcaggagttccagaccagcctggccaacatggtgaaaccacatctctactaaaaatacaaaaattagccgggcatgattgtgcatgcctgtagtcccagctactcaggaggctgaggcaggagaattgcttgaacccaggagcagtaggttgcagtgagccaagatcgcaccactgtacgccagcctgggtaacaggctgccactgcactcagcctgaatactgatttttattagttttcagatagcccggggatcagcaaactacagcccacaggccaaatccaagccacctcctggttctgcacatcccatgagttaaactgatctttgcattttaaaatgtttaaaatacaaagagacacatatactaataatatttagtgatatgtaagataatatggaattcaaattttagtgctcataaagtttcatttgaacataactacactcattagtttccatattgtccatggctgctttcaagtcacaatgtcagagttaaggggtcacaacaaagactgaatggcctgcaaagccatatctacttcctgcccttcacagaaaaagtttgctgacccctagtctagatccagaaaatgaaaaaaagatataatttcagaaaactacattgtatgatataacacaaatggataaataggttttctatctccagtagcattttttaatccttcccttcctcccacaaaaaaatttataattaaaaaatataaaaagtcactctggaaacaaaacaaacaaaaagtcagtcagagatcagaaaacagcccaaatatgtatcctgactttaattcaaatatgtctcagcccaaatatacattccaaatgatcttgaccttaacccaagcatcagattgaaatattttcagaatattatcaggacaaacacacatatacaaaaatgcatatcactattgatcagatgatagatagatagatagatatacaatatctctagaagagaacccaagaaattataatagtggttcttcctggaaagataatggggtgggaggtattggaagtcaaaatggggaggaaaatttcttttcttttctttctttctttcttttctttttttttttttttttgagaccacgtatcaccctgtttgcccaggctggagtgcaaaggcacgatcttggctcactgctgcctccatctcctgggctcaagtgattctcccacctcagcctcctgagtagctgggacaataggcatgcactaccaagcccagctaattttttgtatttttagtagagatgggatttcaccatgttgcccaggctggtcttgaactcctgtactcaagcaatctgcccaccttggcctcccaaaatgctgggattacagatgtgagccactgcacccagccagaaaattattacttttcattgtaaacttttatttatatttaaattcatactgtggggaaaagcaagagagatcagattgttactgtgtctgtgtagaaagaagtagacataggagactccattttgttctgtactaagaaaaattcttctgccttgagatgctgttaatctatgaccttacccccaaccccgtgctctctgaaacatgtgctgtgtcaactcagggttaaatggattaagggtggtgcaagatgtgctttgttaaacagatgcttgaaggcagcatgctccttaagagtcatcaccactccctaatctcaagtacccagggacacaaacactgcggaaggccgcagggacctctgcctaggaaagccaggtattgtccaaggtttctccccatgtgatagtctgaaatatggcctcgtgggaagggaaagacctgaccgtcccccagccggacacccgtaaagggtcagtgctgaggaggattagtataagaggaaggcatgcctcttgcagttgagacaagaggaaggcatctgtctcctgcccgtccctgggcaatggaatgtctcggtataaaacccgattgtacgttccatctactgagacagggaaaaaccgccttagggctggaggtgggacatgcgggcagcaatactgctttgtaaagcattgagatgtttgtgtgtatgcatatctaaaagcacagcacttaatcctttaccttgtctatgatgcaaagacctttgttcacatgtttgtctgctgaccctctccccactattgtcttgtgaccatgacacatccccctctcggagaaacacccacccacgaatgatcaataaatactaagggaactcagaggctggcgggatcctccatatgctgaacgctggttccccgggtccccttatttctttctctatactttgtctctgtgtctttttcttttccaagtctctcgttccacctcacgagaaacacccacaggtgtggaggggcaacccatcccttcacatacattttcattttttaaaatcacaaatagaatctatagaggtccaaatccacttacatcaggaaggtcattatcaagacagattgtgcatggtacttttaaaccagacagaatagttgttgtatttgtattccatgttgtgcagagatctaaaatggcatgtaaacatcaattaaatcaattaaatctcaaccgagattcaagatgaatctcagcttcgccaccttgttcagagatagctgaacaagatgcaacagccccttctatactgatgatcaagagaaatcacagcaccttcaaaaattagacatctcacagaaatggcccctttgctcttggaatgaaagacgtgagggctggaaaggaagagggtggcctggaggagtagggatcacattcattttacgaaacccacatggctgatggaacgatggttaggaggtcaccccacacccaacctcccatctcccagccgtggtcaaagttgaggtcatacattccacaaagtcagcctcacaagatatgaatgctcccatcaacacctgtgcaaaaggaaaaaaaagtccttacataagaggtggctgaaaaatactgtaaagaaccaaaagtaattatgaaatatgaattttcaagtttaaaaatgtccctcctatgagttagtaacatgaattgggtgaggataaccttccaggaagtctggggtacccatgtcagagacagaggcaggaggaatggaggaagtggctttctacctgtcttctccagccaatatctcacaggacttctgagccctgtgaggagagaagcagtctccccattgctgtccagaacatgatgtgaccaatggagtaaatgctagtgggaacacagcaccatcctgtcacttagactctcagctttgggctggagagaatgtcctgctgcacagggcggcattcctatgaggacactggcaaaggtgaagtgggggcagtgatgggtctctgggctcaagtggctttgcagagaggccatatgagaaggacttgagtggacttgtttgtaagcacataaataaaacctaaataaatggagatttataccacaatgacagacagaaagattcaatagtattaaatgttcattttccccaaattaatctatagattcaacttatctctatcaaaattatagtaatcttcttttaaagattgagacttattctaaaatgtatatggaaatgaaaatgatctagactagctaaaacaatcttaaaaaaggaagaacaaacttagaggattcacattatctaatttcaagatctactataaagctacactactcaagatactgtggtattgtcataaagtgtgtagagttatttcctttgtccagtgccaagtccaaggatgggcctctagcttcctgataatacaaggctttccacagggtttcctggctgttctctgcaccctggaactacaacactagaaggaaaagttccacaatgggtctaggctaaagtctgatttctgaagatttcaaggggaatactagagtggctgatttctagaatatttttcctgaatgagcccttgatgtatctttacaaagtctgggtccttcttactattaaatgtgcgtgctgcaattctttttttttttttggagccatagtcttgctctgtcgcccagactggagtgcagtggcacgatctcggctcactgaaagctctgcctcccgggttcacgccattctcctgcttcagcctcctgagtagctgggactacaggcacccgccacccagcccggctaattttttttttgtatttttagtacagactggatttcaccatgtcagccaggatagtcttgatcttctgacctcgtgatccgcccgccttggcctcccaaagtgctgcgattacaggcgtgagccactgcgcctggcctgcaattcttaaaaatcagcatcctcccaaccagcaccaattcactgacaatacagagacctggctctggaccagtgcaggtgctgtagacagagaacaagattccaggaaaccacaccttaaagatggaaatctgggattggttatctctgcaggttgtgtttaaaggcagtaacggccacattgctggtggaaagtaggatcccaggagtccaggtcacagattggcaagatagatactgaaattatcacctatagttgcttcgatgaaatgccttttaaagggaagtctttagaatacccaaggagctcttaaaatagaacattatggtggttacatggagtgggatgccaccttctaactgcactggagagtttacagaaaacataagctcagggctttcaatccttagttgaagacaaggtcagagaaacagctaacatgtattctgccctaaggaagtctgtttccattttatctgagatgagaaccaaatttgacaggttgactatgaattacaaagcaagttgaatctcagctttgccaggtctctcatatttaaactaaggcatgaagaggggaaagtagggccttacagattgcaatgattctgacaaatatgagcaccttaacttcccagagctgcgctgactctctctaccagcagtcacagccccagctcccctgaggaagctgccacccccttgcctgaagtttctataataatttctactgaatgtcttggagagctatagtccattgcctctcattgcctcagaatactgggaggacaagagtcataatccagctgcactccaaaggtgaagtccaaaatctgacctgggaggagatagaatacatgctcaaatactaaaatattttgccaagttatatcagcactaatctaaggaatatgtgtatgtttttggcaatggctaactaggcatggtgttcttaggatggaagatatgggcaaactactgaggcctttgtggatctatacgagagaaggagagacagaggaagaaagagatgaggaggggaaggaggggagagagagagagacagaaagagagaaagcgagagagcaagagagtgcacacaacttcttggcctagggaacagacatatgttaggaacaccatactggaaaggaatggcttctcctcccaaaaccaaaaccaaccagtttacagaccagaaccctttgagttaggaggaagtcagctcccactaagagaggaccatgggacattgccacaagtgagtactgtaaagtttccttctatgcttatctaatgggacttgcaatcattcactggtgacatagcattggagagagggaactacccaggctctgaggcaatgactggacagtgctctgatctgacactgatatttgggaactaaaatatccctgcattgatcagagtgcaggcttttcgaagtcaggtgttgaatggagttttggcttctgcccatttcacagtgagcccagtggttccacaaactcttcctgtggtcactttctcaggtcttgagtgcttagttgtaattgttatcttaaacactgggaaaaacttcacatttgctccctgatggatggggtgagggctattatgatagaatacgtcaagaggaacccccttggaactatcccaccactatgaccaaaagagtaatttaaaagtaatttaatagtatttaatagtaatttaaatagtaatttaaaagtaatgctgctgtcttaatctatttaggctgctgtaataaaataccataaactgggtcatttataaacaacagaaatttatttctcacagttctggaggctgggaagtccaagatcaaggtggcagcagattcagtatctggtgagggcctgattcctcattcatagatggcagtttcttgctgtgtcttcatgtggtgaaaggatcaaacaacctccctagggtttcttttataaaggcactaatcccattcatgaggtctctgcccctaattcctaatcacctcccaaagggcccagcttgcaacaccactatcctgggggttaggatttcatcttatggatttgggaaggacacaaacattcacctcatagtaaccaatcccggggaatcactgaaatttctgttaccatcaagtttgcacttgcatctgattagctgtgcagaagagataacatggccggcctgagaatatagtccttagaaaggcctgcttgcaaagttggcccttggctgacatctgggagcttgaatgttaaacagttctctacactgatacaaaattttccctaaatgacaagagtgcctcactgtgcctaaactttttgtgcaaacagtatgctttatgctgaatacatgttttacttctgggagtctggaattttggcacatgctgggtagaaggagtgcctatacgacaggcctccagtaaaaatcttcaactcctaggctcaggcaaactttcctggtgaacaatatttcacatgggctgtcacaactcgatgcataagaaattaagttattactgtgtgactgtacagggaggggacttttggaagcttacacctagtttcctccagactttgcccatataccttttcccttcgtggattttgttttgtatccttcactgtaataaatcagaaccatgaatatgactatatgctgagtcctgtgagtcctcctagcaaaactttgagcctaaaaatgtcttgggaacctttaacacagtaggtatttcatcctgctgcctgtctgcagaaatatgagggccaacagttttctaaagattttgtcttagtccctcatagtgtgagcagtagtgcttttaacaatacaattcttttaagaacctcaaaggtttcctgtgaaactggttcagatctccatgacccaaaagtctctagcacaattcttttgtgaacaggtctttctcttctttgagagttgcaggcatctgttggacaagaaccctaaaatttttaggagccattttgtctagctcaaagtatctactaagcacgactttcaatcttacagagctcttaacagagtgtcctacagccataccttttattagacttttaccactgagactatatattactttgagtttcctttaatggcttgagagactacaggtgagaaataatttaattttcccacttagaaatccccagcttttctataatctaatttctgcttgaaaatggagccacctttctctaactcatttatttctgtcttagttcattctggcttttataacaaaataccatagcttataaataacaggaatttatttctcaccattctggagaatggaaagtccaagatcagggtgtcagcatggccaggttctggtgaaggccctcctctgagttgcagaatcccaacttgttgctgcaacctcacatggtagaactggtgaactagctcccttgggcctattttataaggacactaattccattcataagggctgcattatcatgatctattcacctccacaacccctccatcatctcctaatacaatcacattggtgatttggtttcaacatatgaatttggggggaacacaaacatgcaatggacatagcatgtggaatgatagacagtagagacttgggacagtggtggagggtagggtaggacaaggtagatgatgaggaattacttaatgggtacaatgtacattatccaggtaccctgacttcaccactacacaatctatgcatgtaactaaattacacttgtaccccatacattcatacgaaaaaaggagaataaggccaacccagctcattttctccagcctaggtgacaagggcaaaactctgtctcaaaaaaaaaaaaaaaaaaaaaaaaaaaaaaaacaagaagaagaagaaatctttgcctatcccaagatcatgaaactatttctacaatatcttctaaaagctttattgtttcttctttcacattaagtccatgatccatttggaagagatttctgtgtgtggtgtggggtaggagtcaaggttcctttttgtttacatgaataagccaatcaagccagctacctttactgaaaaagcattctttccctctttgaactacagcggctcctttgtcataaattatgagatggtgtgtttttgttacactgatctatttggtatcttgcactgctgttccatttactgccacattataataaatcctgataaatggtagcttaagtccctcaactttgtttaagactgtcttgattattcttgccttttggaattttcatataagttttagaatcagtttatcaattttcatgaaaaatccttctaagattttgactgagattgtattaaatttattgttgaatttggggaaaactgacagctttataataatgaatcttctaatccacaaacacggcacatccctccatttattaaggtacctacaaatttttgtttgtaatatcgtgtaattttctgcacaagatttgttagatttatctctaggtaattgatggttttgacgatatcttaaagggcatttgaaaatgttattttctatatgtaatacttgaaagctgttaattgggtctctcctctggtcaggcatctgtgtgcaccaatgcagaaaagacggggactacaaggaaggaaaatgttgcatcaggaagggctgctggcacatctttgttccccctccccaaaacctcatccccaagcaggtgagtcctgactctccccacctggcctgaccgagactgattaaagatttggtgatacctggattttcacagtagtgcggtcacccacaaatgtgacagaaatgtccccaaaggcctgagggctccttctgctctcacccttcctgagggaagggctgatcctaagacccattacccccacattttcaagtatgagaatcctgaaaagaaaaatcatttcatatttcccaaggaatagatattcattatagtgaagtcagatatatagaacaaagagatggtaaaacttgctcataatctcattaccagcagataaatatagttacatgttttgtcacgtcctttcatactttgatccatggggtgtgtgtgcaaaataatcaaggcatcacactctacataattttggacctcttcttttttttttcactcaccaatatacagtaaacagctttccctgtcagtggatgtatttctacaatttcattttccccccaaggtttcacatcattctcaccatgtagatataccatattttatttactaattcttgaccaatagatatttagacttcaaaagattccttagaatgaaatctttccatgcacagttgattgtttcatcaggaaatattctttgaagtgtttctaggtgaaaatgcatgcattttttacattttaattttatttaattttttagagatccctaaaaaattaggaatccctgttgcctaggctggtctcaaattcctgggctgaagctatcctcccacctcagcctcctaagtagctgggattgcagacacatgccactgtgcctggccagcatgcacgctttttaaactccaaaaatacattgccaaattgctgttacgagggtacatttttttatgccaaaaagttttgatcaacctcaaaatactggctatagtttaatttttcactatttgacagtaggtgtaatttcatctgagtttacaattttaagtcacatacattaaaaaaaaaaaaaaacctcagttacgtttgtgaaatatttacttgtttggaggaatgtttcagcaatcttttgtaataagttggaatcccccagagtgggaaaaggatgaatgaaacacatatttagcacccgctttgtttcagatcttttcaaatacatttttttttaatcttgagagctttttatgatgtgtggatttatagcacccacattttacagatgaggaaactgagaaataaacaaaatgtctttttcttttgcttaccttaccatgattcctctccactctctcctttaagtcactgggcttatattgcaaatggtgatcccaggaggccactgtagctaatggtgtcccccagtttgcaataaagatttctgtcatctccctctcccgctgggttcagaaacaaagcctgggatggcggcaggcccattgcgccatctactggcaatcactgtgcagtgcatgaccttcccactgcagtactggctggagcagatgaggtggaaatatctgtaaatttcacatctgcatttactcttcataacagctttctgaagtaaatattgtatccttatttcaaatgcatggaaactgggtctttgagagatgaaatgtgtcccacatcaagcagttggtaaatggcaaagctgatctctttgccaccaaagccagaacacttttcagcacagcatgctgcctccccgaatgaagtaatcatgaggagctgctgtccacatgcttctgccttttcctccaaaccactcaaactataagataacagcaaaagaaatacccagcgtctttgcacagagcggccacaaatgctttctgctgtggcagctgctgactcatccacaggaccgtttcttccacctcagacccatgcgttcctgctctctgccaagtccgaactggagaaaacaaattctgtcccagtggggtttcccatctttggctggctggctggacttcctccacaaccactctctcgccttctaagcaggagctgggtgagacatgagatcatgggggcatccgacagcgacagccatttctggggccgtcatcatagtccaagccccaccgagactggcagcagtatagcattgtgaggggggctgaagtcagatagactcgattcaaaccctgcaccctccttttcctagttctgtggctttgtgcaagtgaatcaaactcccagagcctctttcattctaaaatggagacaatagtttctacttgtagggttgttctgagacttgaataaggttgtacaatcacctagctcttagtgcttatttattgagtacatagcaagtgctcgataaatggtagtgtgaagttggcactaggtatgtaccttctctgaacctcccttggtcagtaaggaacattagcatcgtgtgggggttaagatcctgaggtctggagtcagacagacatcctttggatctggactctgccacttgctagccatgggaccatcttgtggccttgtgtctcctctctgtggacctcaaaacgagtctttattcaaagcccagggccctgcctaatattaaggctttagatacatattttcaaattgcctcatgagggcccttttaaaacatcagaaatgttaaattactcataggatagctaaatttgtagtaataaagtatctgcatacatgcctaatggattcagtaatgccactaaataggagtttgtgttatttacagcagtctctacttatatttgaaaagaataaaacatcacttattaattttacagacaatgtgtgggttacatatggacttgtgaatctcatgcattacccgtgttgtcccccagatacatacagtcactgtgggaacaaacaccaccctgagtacctgctgcttgctagggattttcatggaggttatggcatttaaacctgaaacagggccaggcatggtggctcatgcctgtaatcccagcattttgggaggctaaggtgggtggaccagttgagcccaggagttcaagcccaggctggccaacatggtgaaactctatctctaccaaaaatacaaaaattagctgggtgtggtggcatatgcctgtaatcccagctacccgggaggctgaggaatgataatcgcttcaactcaggaggcagaggctgcagtgagctgagatcacaccactgcactccagcctgggcaacagagctacactccatctcaaaacaaagcaaagcaaaacaagaaaagacaagaaaagaaaacctaaaacaactctgcagaataattgttattatcaccattttatacacgtggaaacaggctccgaggggctcaatgaatttcccagagttctacagataataaggggcagagccaagatcctgaccctcatctgtctgtgtagcatgagagaaatatccaccgtggactgtatttgaaaatattcacagatactaggttaatgctatataaagtatattatacctaaccttttataacatattttttcatttaacaataattgtgaatagatacttctatcaacctacaaatctacctactttatccttttaaaggactatgtcatactccattaaatgaatttactataatctatttaaccaacattcctttagtgaacattttaatggtttgcaattttttgtccttgcatataatgctgaaatgaactggatcatatgcaagtatttttgtacacctctagaagtgattttttaaaattcctaagagtgagatgataaaattagttacaaacatttactaacacatactaccaaatcaggcagcataataaaagatcatcaaatttttattcattcacttagcaaatacttatgtcatgcttgtgctgtgctaggtactgctcccagagcttgactcctcatgacatcctgagatgagaactttaatgattctgttttatacataagaagactgtggctcagagagacaaagtaacttggcagaagttagacagaaaatagctggtttggaaaccagggtctgcagcacccaggcacttgatgactatgttgtccttcctgatttattaaggctttattcccagaattactcaaatcctaaagaataaatcttatttgatgggagtatcaaatgagattttaagggggaaaatattaacattaacattatatgttttaaaataagattttttatttttccagaaaaaaatcttaaaaattaaatcatttgtttcatttttttaaaaggaaactataaacccaatattttaagaaacgatttcattcactcaacacttttgagctgagtctctcctctcatcagttctgtgtgagcagaaaagagggaggcttaggggcttaggggattaggggtcatggtcgctgggaaatgcaacagaaacctgtcagggctgctagaacctagaagagttagccacagtaaaccggctggtgcatatccttacagaacttttattttgtaagtgtgtatgcaaactagctactacattacattttacatacattaataatctccctttatttttttacctaatgtatatttttccatgaccatgaatgtatttttataactttttgttttaggttttaaggcatttcattgctaagttgcatctcctagatttgggaaagaatctaaaaaacacatatttggtgcattctgtgtgctctgcccagtcacacacattattctatttaaccttctgatgacctaggtatcttcaccactcttctagattgttgctcccagcagtcatgtgactcgtctaaggccatgttgctacaggtggcttgcaatccaggttggctgaacttccaactacattctctttgctgtgcactgtccaaaagtagggagagtttcctgcctctggaattctctatgtacaggtgccaccagttgttttctttgtgcacagaagaaagtaaaacccagaggccaccattagtgatggagatgcattgtcaggagaggacagaagatgggtagaagttgacagagctctcatttctcccacatgggcttgtaccatatgcaaatggtttcataagcatctggtaacagtgtgttcagccacaagagggagaccaaattggagctggagatccttcttctcatgcctcaccgtacttttgacttcccgaaaaagaggattcgagtggctcattttggcatcttgcagtatagtgtatttccactgggcagggagtcgcagtctctcttatgctcaggctggccacagcggctttcctggatatgtctttgtcctggttcaatcctggggcgggggagcagtgttgcccgcaccttcctaacagagccagcctcccaagtagagcagctgaagagggaaaacagtcactgcgggctgcaaaactcattgtctggagcaacatctgggggctggggcaggtcctcggcccaccatggtgatgaaaagtgctcaaatcatcaaagagtaaaaattctacaccaaaacccacactttccacaatagtcatgtgggtttctcctcctagcctgagggcatttcttgggtcctcctttctgtgcatgattctccagctccaggacagcccatctccagcacactctggacaggttatgcctgattctgcctgacatgctccaggcttaagaaactggctcctgtgagcctgggctgccacccatctccctggctctgggttccaaccctggcttcctggggtgcttgtggcatgggatggagttaatggtcagcctgggagttggaacttccacattgtgttagcctttaaaacatcagtgtcagccaggaactcagaaaagataaagaccccagattgccaaaagccccttctcttaaagggatgagtcaaaggctttcttcctttcccacatcccaggcaggattcatctctaccctattcccagaataaacagagtcccattaggttttcatgcctacaattgtccccagtttgtactaaagagtagttggttccagacaggaaaaccatagcctcagctccatagagggtgagaaatgtgtgtataaacagcctgcattcgaatgcagaaagtcatggcagtctgcatgaagaccaccactagttcaaatgatgcttgtgtgagaattagagaaaggcccccttccagtagacagagtcccatgggtaaacagacagcacctttatcctatttaggaaaagtgtccctccctctaggtgcaggcagtgccagggtggagcacttcagaaatgacactggagatggatgatggtcccactcatcctggccaccagacatagttgttcagtgcacaacctggaaaatcatacgtgtcagccctggttagagtggatgaggtgaaagtatggggacttcttacacttgtgctttcatttcctgttacatcttagttataatgttattctcattgcacagacatggaaattacggcccagaaggtgaagtgatctgttacaaaataaacggcaaggctggtctcttcaactcaaatccagaccactttccaccatgccataaatgcctccttgcctgaagcacttttaaagagccaccttctgcccacgtctgcatcctttagttttctcaaggcacaaaacctttaagaaccacccacccagcatctttgcatatcgtgtgtcctggtatggcagctgctgaccacgccctgagtcatgctcatggccaagctccccactcgggaccatttctgtccgtgcagactcatcttttcctgttctttgcaaagcccagctagagcaagcaaattcttcccaatgggtttttcccatctctggttgcttggctggctgggcttcctctacaaacccccttcctttcccctaagcagggcccggtgtccccatcctgcggagttgaggtcatgagggcatctgaccaggagtagctattcctggtgctattgtcattggtcattgtcctgtttcatgtgtgaacatggctgctggctctacagagatttggcaggtagcaaggacgtttcttttcaaatcttcctttggaagtcagacttggtgaggatcgtatgcccaccttttcctagctctgtggtgccaggcaaagtctcagtttctgcaaattggggttaagaattcctacctcacagtggtcttttgataaataaataagatcttaagtgaaaattattccactagaaattgcacagtcactttggtcttcatcctggaggtccactgacaagcctcatgcaaacctgtggccctgttcatcttaaggtgtttttattcatactttcaaatggcctcaggaagaccttttataaagtaaaaatgttaggcagccacatgatatccattgacccagtgaggctgttttactggatatgaggggtttgacccagcactttggggggctgagacaggcggatcacttgaggccaggagctggagacccgcctggccaacatggtgaaaccccatctctattaaaaacaccaaaaaaattacctgggcatggtggcacatgcctgtaatcccagctacttgggagactgaggcacaagaatcgcttgaacccgggagtcagaggttgcagtgagccaagccgagatggcgccactgcactccagcctgggcaacagagtgagactctgtctcaggggaaaaaaaagggtggggggagggtttgaaaaaatagtagcatgtagttatgtttctacaatatttgatatatataaggatttaccaacctcatgcattagctgctatcccctacagcagttgctgtaggaaaaaaaatcaagttctgagctcctactgtttgccaggcatattctgagatgatcacgttgaaatctcagagttaccctgcagagtagtcagggtatcactgcctgacagatgaagaagctgaggcttccagcagttaaatgacttaccccaggccacatagataatgagtgggagagcccaggtctgtctgtgaggtataatgaaattagcataaaccctccacattggcgccacttgcataaattaacatattctctcacagaaagtattttattgggcataacattttatatgttttaccatttaacattagttatggatcttcccacgtcacataaatatgtctcattctttttcgataatgtgattactaatgaatggatttactatcattcatttaatcaatactccttttgatggctattttaattgtctgtttattcgttttgcacagattgatgtaatgaacatgaatttataggaatatttttgtctgcctgtgaaaatgtttgctggacaataaattcctaggagtaaaataaggtcaaagattataaatacagtatttattttcataaatattgccaagtccgccacaaatgtttaaatcactaatggtttcagattattgtatttaatgagtaaacacttttatagggtttacttttataaacaattttatttgccagatattattctaagtgctttacaaaattaactttttcaatttttaatataaccctgagatgtatattatgattatccccattctacagataagaacactgagaagttaattaacttaccacatatctaggaaatgacaaggctagttgcacagccaggcagtctggctcctgagtccacattttagacaacactattcctcctggttcttttgaggcattactactggaactatcctaatactcataaataaacatttcttttggggagggtcaaataaaattttaaacagaaaagtgtttcaccaactgtcaagctcataaagttgtacgttatacacttttttcatgatgcccacagataatttattaatgatatcatctattttaaaagacatatataaaactcaacccttaagaaaggactcctattagtgttccccacaggcaccctcctcagtcttacacctttccaccccccaaaacaaatcattcagcatatttatttcatactgtaatataggatatagctactttttagattttcttatattattaacattgatcatacaaacatggaatagaaattctttacgttttatctggatttaaggtgctacataatggaatatatttctatcaagccatacactttggagataatgaaatcaattgtgttctagcttaaacattatgggaatttcagaactgcaacataacagataatcctcagatgaaaactaaatctctcctctggtcaggcttctgtgtgcatcagtgaagagaagacggggactgtggaagggaaaacagtgagtcaggaaggactgtggccacatctgttccccggaccctcaggtagttaaatcctgacctcctctaccccagactgtcctggggaatggccaacactggcctttcacaactgtgtgttactagaaatgcaacagaaacccagctgaatccccagggtttcccttctgcccttctcaatggaaagatctgtcccaggaccatttattccaacattttcaattatgagaaatctgggaagataaagttattttcacatttctcaagaaatacatatttattcatactcattacaggaaagtcagaatctacagaaaaccaagaagatttttaaaaatccatgataccaccatcaaaagagccacacttagtatgttggtccacaggtttcctagcacccttttctgttggtgtatgcacaaaatacacaatcacattctgtctacattttacagtttgccattttttgattaacactatatattgaacaatttttaagacctgcaacgtatgtcgacaacattatttcaaaataatatatttacaaataaacgcacacacaaactgtctgtcttatatacaacatgtcttactttctaattctccactctggaagatttaggtttttctaactttttcttaatatactcaccaggagtcagtaaactttttttataaaaggccaaagggtagatattttaaactctgcaggccatagatttctggtgcaacacttaactctgctgttgcagggaaagaagccatacacaatttgtaaatgaatgggcatgactgtgttctgataaactttacaaaaacaggtggtggactagatgcagcctgctcctctggacatggtttgccagcccctgacatataccactacagaggatgctgttagaatgaaatctctttacacatctctgatcatctccttaggactaattgctggacatgacatgatggtagctgtgggtcaaagggcatgcacgctctgggatgtacattgccagattgctcatgatcagcctttctcatgtcaaaatgttttgtgaccaccagaaggctggttctgcttttattatccattgactgaggaatagaaatgacatggcatgtatgcaggatatttaactatcgtatagataatccttgtgcacaagtgcattctatattctttcccaataagtctacatctgccagagttgaaataaaagaaaacaaaacaaacctatttagcaccttctgtgtagcaggtccattcgtgtatgttgtatttcattctcagaattcttatgacctaggcattttaaaattttttttaaaaatagttgacaaggattgtatatatttaatgcatacaatgtgatgatttcatatatgtatatattgtgtactaattatcacaatcaaatttattacatccattaccacctatgctgtacattaaatctccagaatttgttcatcttataactgaaagtttacaccctttgattaatagcttcccattttccccacctccagcccttggcaaccaccattctactatctgtttttatgagtttgactctcttagatcccacatataagtgagatcatacaaaacttgtctttcggtgtctggcttatttcacttagcgtaatgtcctccaggtttatccaggacaggagtttcttcttttgaatggctaagagtccattgtttatatatattttatttatccattcatctgttgctggacacttgggctgtttccatatcttgggtattgtgaatagtgttgtaataaacatggggcgcagatctctcttcaaggttctaacctgattgctgaatggtatgcttagttctgcttctaattttttgaggaacctccatactgttttctgtaaaggttataccactttacattccaaccaacagtgtacaagggttctctttcctctatgctttcgccaacacttgttatctcttgtcgtttttttataagagccgtcctatcctatgaggcaatatctcactgtggttttgatttgcatttctgtgatgattagtggtgttgaacaccttttcatatgctgtctggccatttgtatatcttctttggggaaaaaagtccattggggtcctttgcctatttttaattgggttattcatgtatttattaatttttgctattgagttgtgtgaattccttatattttttcaaataaccccttatcaaatatatgggtcgcaaatattttcttccatcccgtaggttgccttttcattttgtcatggtttcctttgctgtgtaaaaccttttaagattgatgtagtcccatttatttattttcacttttgttgcctgtgctttggtgttacatcaaaaaaaaattgccaattatgaccaatgtcgaggagatttttccctatgtgtacttccaggatttacatggtttcagatattacatttaaatctttaatccgttttgagctaattttctgtatatgatgtaaaacaagtgtgcaatttcattctttttcacgcactttccccaacactattcattgaagacagttttctttctacattgtgcttttttttttttttttacagtacagtgaaagcaagtctattaagaaagtaaaggaataaaagaatctacattgcatatccttgatggccttgtcaaagatctgttgaccatatatgcacggggttatttctgggtgagcttggcatttttatctacctcattctaccgatgaggaggccgagtctcaaagagttcacagacctgcctaaggtcactcagctagaggtgatacaaccagggtttgaactgagatctgccaagcttctgagtttattctttttcccccacaccaaggatcctcaattctgccttactgacatcaggatccggtcaattctttgtgatgggggctgtcctgcacctggcaggatgtttagcagcttctctggcctccacccactggatgccaggggaatgcagaagaggcttgttcattctcccatttaatcctcaggacaatatctgacataaatgttatgtcttttattttataaatgaagaaaatgagactcagaaaggtttaagtgagttacttaagaacacacagacagcaagaggtagaactggaaaccgaacacaggtgtccacatgggacaacaaaaaagttcacgttccatcttcttttgagtctctcatttcaataattaccattgtgtggatatgagctgaagtacaggaaacctggggctgaactctcctcccatcaggcctaggagccccagaccagaaccccagcccaaggtctcccagtcaggcccgctggcgtgagctggcatctacactagcatggtttcccaaagctgcagggatgccagtctcgccgctgatgaaggaaatgaagggcatttgcttctcctgcaggctctcgggatttaacacagattccttttcttgctgtcttctcccatagcacaaaacagggtggtccatccccctcccagtgtcccaaggctttgttgcgtgttctctttaatttctcccactcttgcggtgtaacctaccctcatctccctggcaacctttctgctgtatcctctcgacacctggatcacaagaacacttgtgagaccccttaacaagctacatcccaaattatcattcccctttgtcctcagccagtgctcaggtccaacttgctctcctggggtgactttctttcctgcccaatatggtttcatcatctgtaaattggggataattaaagtcttgatcctgatatttgactctcacagcagaagtagcaagctcagccaagtcacttcaacaagaggagacgttccttgtgaaccaaaaggacactggtcacaagggccgctccttcttctgtcaggcctctccagcacgcccttggctcagccgaagaagagactcaggctgtgcttctgcactgttgggataacataggcctcttccatgtggttccacaccaggaacatggggacaatcagacctctcccagtgtgggcataaggatacaagatcatgtcaatattgacattcataatggctgggcgcagtggcacacgcctgtaatgccagcactttgggaggctgaggtgggcagattgcttgaaccccagagttcgaaaccagcctgggcgacttggcaaaaccagtctctactgaaaatacaaacaattggctgggcttggtggcgcacacctgtagtctcagctacttgggaggctgaggtgggaggattgctcaaacccagggaggttgaggcttcagtgagctatgatggcattgctgtactccaacctgggcaacagagtgaggccctgtctcaaaacaaaaacaaagacaaaacaacattcataatagtagcaatagctactatgtgccaagcccaggcacctcttcgagtctttgctgtcaccctatcaggtaagcgtgcttagaagttacacgaagcccacggctcagtgtttggcccacggtaagggcctaaaaagggatagccccagtggtggggatgctgctgctgctgaccattaaccccagtctgctccaccttcttccaggcagtctgtgagatgtttcatgtccgaggcaaacagcacattcagatccccaagctctccacctccagtgtgaccaggcacctgcaccacttcaggctcatgcaggactcacagcctttggacctcagctaaaggacttgcttctcttcagcacacggggcttgtttgtgttggggtctgagccctgagcccatggtcaaggagacccccaggtctttctgaacagagacagctggcctgggggcctccctctcactgcgtgcaagaggctgttaggatgcaagactcaaggcgctgagggaggctgtttcaggagggagccccaggagggtggtggagacagaagggggcagcatctgccgaggccctactgtgtgcctggcaccgtgtggggtttctggcccatatgggctaagtgaccctgcacactcctcttaggagaaaggctcagatggagaaattgcagttcaggaaggtgaagcaagctgctagcctgtggccatgttgggatctgggcctcagccttccagccacgaaggcagccaagtgtcatgaagaaggcatcacagaggcaattccaggctgtagtggtgaactttccactctgcatccccgggtgctgtgccctgtgccctgtctaaggtagccctgtgggtttctatatgtttaaattgtccccagcatcaatgatgctctcctgtggatcccaagccatggagatgtcctgggacttttcatttttaggtacctaaattgaatttcccaacacacagaagcaagacagccgccctaacagactcttgcatgcagtgagagggaggccgccaggccagctgtctctgttcagaaagacctgggggtctccttgaccatgcgctcagggctcagaccccaacacaaacaagccccgtgtgctgaagagaagcaggtcccttagctgaggtccaaaggctgtgggtcctgcatgagcctgaagtggtgcacgtccctggtcacattggaggtggagagcttggggatctgaatgtgctgtttgccttggatctttatttgtgattcagaaacagtggaataaaaggaaaggaaagaaaaccggaatggccacctcagcaggatgctccaagggtagtgtccaggtggcactgactcagacatgtgggggcttcccccacccatgctcaagagtcactttgccatttcaccatctctctgtcctccacacccctcagcagcaagcacaccaagaatgtgttcaccatgaagctcaaatctcagccgaatctagagtctgaaatccaagtaagggaaagtgtagagcttctcggatgatgccctgtcaattttattttaacgaatgaaagaccagaagaagtcagtctttgaaaggagaggacaggagcatctgctggcattagcagccatgccatcgtaggaccggctcacctggacccgtggccacctgtgcttttacatctagtcttggttaaccatgggccacttttccagcttggaaactaagcatatgctccacttcctctccttcctcattgaactctttcactaaaagaacagtgcgagagagacttaaactgtttgcctcattcttaagaactttcaggaaaagtgttggcagggaaggaaatctcccagctctgggaaacagtcttgtggattatctgctggtttcattgatctgtgctgtcctccctgcattcattaggaaacctggccttggttcaagtaagaacaggatttgtcctggtgacagagaaaggtttcttctgatgtccatatatctccgagggggatgctttctccaggcagaggctgtggccaagcgatcggggggctcagagggctgctgggaaggggtgggcccctctctccccagagggaaactcctggggacctctcgagcacccctgcccatcctttaaacataaattcataaatacaaacaagtaggccattcacagaaatatataaaatatgtcataggacgggtggcactctcatatggcaataattatgacaggggccggcaaatgacctgagtgacccggagtggcctgagcactgactcccaaatgccctccataggatgttctgcatccccgagaccctttcctgggtcctcctgggccctaccaccccctagaccatccagacctcaggtcatccccctgtctgttgacagagtagtctccgttcctgaatgtgctggtcaccagcaacagcagctgctcctcctccaggaagctcagcctatacttctacacgcagagaacctggacggcacccaggtggacctaagccttcagctcccagtagacgctctgggtttcctaccctgcccagacactctgggcttccccccacacctcccctcgtccggggctcctgtgtgcatctgtctctcccagtgcccagcacaggcgtggaacggaagaggtgaatggaccgatttgaacacatcatcctggattctccgttccctctcaagccctgcagctaacccatcggcaagccctggaggctcttcctccaaaatcctgcctatcccatgtgcaaacgcctctcaccatgtccactgctatttgcagttctgtgtgtgtggaaatacttccaccaatttggaatgaacaggtcacagctgtgcctggagggaatgcccagggaaatgtgccctcgccttgctgttctatccaggcccacccagctgaggatgggggacctgccaccactctcctggcagttccggactcctgggaaccggcaggtgaggacccaagagtgttttcagtgacccggctgacctggtcatccgtcagtcccaccttggcctaggcctctatacagcacagatcacagctcattccatcctggcattacactggcctgtgccctgtcctcagggtcacatccgtctcccagaagccgtgcaaccctggaaaacccaggtctaacagtcaggttcctcctccgtgcattaacaatggcgttgacgcctgctttgcggcacgctgggaggggagagggaggtgtatgctggagagctccccaggggcaaggcctggctctgcgtcacccactgtcagatcctgagagcctggggctggcccagcacgtggccaccgttccctaagagttggatttcatccctcagtgctgaaggcaggggatagagcttagacagaccccctgcatcctgtcttctttatctacagctttctcatccttgtccctttcacgtgcacccggcagagcaggtgttcactgagcttgagcaaaattcaagctagagcagctgatggatcttgaggcctagattcactgtcaaagtgtttctcaaacggtgctctccagaacaccaaggaaaactcatttactctataagtctgaaaatccctgcccaccggtctacctttgtgtatgagcaatcagctctaccattcagcccaggtgtgtgtttgctggaccatgtggaggaagctgaagagacatgagctgaaggcagagggtgagtccaaggtgggatcttgggacaggtacgagaagttaggcaaaaatgggataattctagccttcataaccttagataatagttcacattattatttagttaatagaattgtacccacattaaatttctcaaatttttttaagaggtaaagtctcactctgtcacccaggctggagtgcagtggtgcaatcatggctcactgcttcctggaactcgtgggctccagcaatcctcctgcctcagcctcctgactaggtgggactataggcacacgccaccatgcctggctaatttctttgacttttctctagagaccgggtccacctaggtttcccaggctggtctcagacttctagactcaagtgaacctgaacctcccacctcgacctctcaaattgctgggattacaggtgtgagccaccacacccggcctaaatttcttatgtgccatgggactgcaaaacatcattattaggggcagctggatggaaggtataggaggacactatagtgccttttcaatatttctgtctaaaatctaaaagcatttcaacaggaaacatttatttcaaaacgtgaaggtagttatccttccatgagtttaaagtacaaaggcaggctcacggtgtcgtcagaattcagaacgatggtcgtggggcttggggtgctgggaggggctgggcatggttggctttgtgatctggggtctggtgtgttccatctctgaatgtctctcaagctgcactctttcttaatacatattcataagtttaaccaaaaataaaacgaggacgcgaagcttgcttgggttgttaagcctagggaaattatccagccatgagccctggcccagatgcttctagaagcctggagggaactgagaactttccaagtggaggccgcagaggcaaggccctgaggtgggagcacactgctgttcgtccctagctctgaagggggtgccctggtcggaatcagtgctgggtgcagcgaaagccgatctcacccgctccgcagggtgttcagcctgccagcagggggccagctggtcctcctgggatatggcacggacccagcagctctgtctgaaatcataatggcggaaccaaggcccctctacgtccaggtccgttgggaggcggggcatggagttccactgcaggaatctccaggaaccctgaggtcctccctgagccagggccgggctgggcacaccctgagtgcccacagggtaggtgtcttcccggacagccccaccaggacagggtgtggaagaacgaggtgcccgtggcggggaagctgaccaaatgggccgcgggaaccgggctggtgggcctggaggggcctgcctgtcccccttgcagagggtcttcctgccacgtgaagccggcacaggcctggatgccgacgacccttgctcgggtttggctgaaaggaaaacagacgcggtcagcatctccagtgagcccacgcaggcctttccgggctgggccccacctgcctgcatctcggagtcctcggggtctctgtgtggcccccgtggcctgacaccgaggacacgcctgtagtctgctgatcccagagggaggggtgcatgctgcctggcgtggggaagctgtcgtggcatggcgggtggctcctgggactgcccccagggttcagactggctgggggcttcctgccacacaccttcgtcccagggctgttgggcctgggatacggcccccagtcagaactcaggtgggaggggccttggatgtcacccagccccttgtcacctcacgtggggacccgtctccgcagtgggtgattgggcccggacgtgggtcaccctctgccctcctgggctgcccagtccatgccaggactgaccgttcccacttctggctgaactcttggctctggctctgggcccggggtcccgcctgtgccctctccctgaatgctctgtgggtcagggacaccgattcccttgactccctggctccaggcttcttgtcctggcaaccttggaggagcgtgcaggagtgaggggcctctgctgctctctgaggctgtgggtgcttgcagggaggggcggggtctcccacaaatgggtctgggctcgtctagtaacttggagggccctgcgagggggagagggagacaccgtggaaagtgggagggggcttgttggagggtcttgcccacatccccctcctgcgtgcacagcatgtccagtatacacgcactgagcgcctgccctgaggaccggtgggcctcctgtactttcttagagtccaggaggaagaggaggaagaaaaggtgaagaggaaggcccaggtagtagggttgcgggtcccgggcactcccctactactgactaccccagagggtgacatgggaggggacatggcactggagcccacctgggggtggcaggtccccctgctttcttgttagtttcttcatagaggccctaagatgcttgagcacagtgtcctcatccctggcccaggtatcaacgaaccggttgcaaaaacgtgcccacgggccacacctggacgtcttcgtgaggcgctctagggacagggtggatatcaggccaggggagttacctgggaatggtcacagctcataccccgtggccacttcagtctcctactgggcggtgccggatccttttgtggccaccccaggtgtccagatatacacaggagactgtggctggggggcgatccggacagggaagtgctcaccacactctcgactttcatctgggtcatgtgagggatgggctcggtgtcacagtgtcctgcccagcccacctggccggacctccctctgggccagaacagcggatcatgaggacagtgtgaggaagctgccctcgggccagtcggggtctgaccccagggctccccaggccccgctgggcacacgtagacttactctgctgaaccttaaaggcgattcttgttatcggcatcaacgcctgttcgccttctaccagatacacgtcccacaggcgcagggtgagcccgagagagatctgtggggacagcaggtgtgaaagaacctggtccttccaggctggggctggtggctcgagctgcacacactggggcttcagtctccagagtcagtgaccttccccatgagggtcggctgagccctccaggacgctgggtcagacaaggtcttgaagctcctcatggggggcactcatttgagtggggatgtggctcctggagagaggggcttgcccagggcttgaggcttccctgagccctctcaagttgggtcctggcccagtctgcccatgaggctgggcctgagccccagccattgccctgggatgactcctcttgggcagagggttttgcttgtgtgtcctttggggacccgcctgagcctcctgtgggctgggagtgagccagacccccgggctggggaagcagggcactgcagggcaaggaaggtccctgagccagggtctccctatgcctccttaccccgtcaatcaatatccggatgaggcagcctaacggggaacactgcccacatagatctttcttgtcctgatggaagcaacagaggtgctcaggccactgggctaccctaaaaacctccctcttccagggcctctgaagacccttcccctagtgcagaacactgggcggtgtccagagctccccacaacactgtcaccttcccacactcccggtggacacactgccctttgccctgctctgcgggagctgggcccccatccctgtgcctctgtctcctccagggcaggaaaggaaaccaactcccagcccatggagaacccaacgtcccaggtcaggccctggctgggactcagccagtcaccagccccacgaggggccccagcccccctgctcctacagccccacgggaggcagggcctctgggaagagctgaggggaccataaactcacctgatgccccatggtcttggattgtgacgtggctaccacatgctcctgttggtcttggagcccctggacggtcccgccatttgggctgtgaaatcctgagaagcccccagcccatcatgaaatcagagccttcccccaagatgtggagccatcagctgcaagagctgggcagctggagaggcccccaaaccccaaggctactcccaccctcccatctggtgaccccaacatgcggcctttaccctggggaggtggggcgggaacattccctggagcctggctggaggttcccctggaggcctcctgggccagggtgcaaaaagggcaagcctgactttcaggccacgacagggtggccggaactgggtgggcgctgggcttcccggtcatctcctggtagtggggtcgggccaggggaacaggggatggggagatgctgccacctgggcttggtcggcccattcgtgggcaccgatggcagcaggagcccgggcagctggagggcaggaggactctcagggaggggagagtcagctgcacagaatcagagccggagggcgtggctccaggacacagagggtggccacggggaggatgagatgccctctgctgatggggatgacaggcgtctgatttgggctttgggggtcagccgtggactcctgtgggaccctcagcagagacatcctaaagtctcccaacaagctggcgacacaaggagggtgccttggctgaaagctgtgatcacccggccagggtggccatccccaggtctggctgcaggaggtccccggggcagctgttcacttaccctgcagggagtgcctctcactggccagcagctgcaccagtgcccagaatgcatcctcctcaggaagatagaggaggaacaaggcggcgatgtggctcaggtccctgcagtagcccacctcctgcaagagccagagtcaccatggaaggacatcacctgggagggctgaggtcacctgggaggactcatgtcattggagagggcagaggtgactggagaggcttcctctgaaggagaggcttcctctgaaaaagaggcttcctcaggatgcacattcatttcatgacaagagccaagtccatcaggcacttcagcaccttgtccaaaatgtctgctgatagcaccatcctgtgtgcgatgctgccaagctcctgggctttggggcagccccaggaggagggcgtcatttcttgttctgagaagtggtggtcaggcccaggtgacaccaggagtccgggccctgactcctttgtgtctcagcttgaccccttgagaccacccccttccttggaggtttatgccagcggtgagctgacatcctacctcctatatcctggtgggtcacaaatactaactttaaaagaagcaacgacacccccaccagacacccactcctgtcaatatggaaatatggcccgggaacctcactgccgggaatactcaccgggttatactcctcatatgccaggaggatgtggagtagttcccgctgcctaggaaacagagaaagggggctttggtttgttttgtgcagatgttgttaatttcactttgtctacaaagcctaacagcaaatcccatttcaggttcagatgtttcaccagataagcagtgagctcttcagggcctgagactcttgaagaaatgtttcagtaaaatccacatctgtgacatgcaaatagcccagttgtacagtgacttgcctgatccttttcactctgaatgattttttttttttttcagtttgcacacacgccagttcagtctgtgggtgtacagttcctccacggttccaaaccaatgtgcagagtctcccggccaccgctccagcccctcctggggcgactccttcatcctccaagtctccagggtggcccctatgcacccagcctctccctgatccgtcagcccctggccacccagactgcttctcagtccctgtggtttggccttttccagaatggcctaggaatgggaatcctacggtggtagcttattgggtctggcttctgtccctcagcaaaatgcatctaggatccacccacgttcgtgcgggcatcaccggctcgttcccttttctcactgggtcttccgtttgaagggaggaccagccttgctctccccattcccgtgttgaaggccgtccccgaaggctccgtgtgtgagtgacgaggagtcaagcagtgaacctggcatgctggtttcatgtggatgtcagtttccaaatcagtgggttcaatatctgtgacactttggggatgtgtggttcaagtccatcgagctttgtgagccactgcccaactggctgccaacgtggctgtgccatgtcatgttcccagcggacctggatgagagtttccaggacccctaattctcccagcatttggtgctgtcactgttgcctgggggggctcatgggccctctatcctgccaccctcccgtgggtcctaccatgggtccccatgggtcagggagagcacccttcaccattgtgcatgattttgtttgctgccttccatctcctcaggatcctcctgggttctggccccacatgttccagtctggcccagggcttggaaccagggaggtgctcggttcatggtgccggctgctccctgggccgggagagctcttggcagctgtgtcatccctcctgggtgaccctggcttctgctccggggaagcccccatccctctcattcaccccatctctgctgggaccctgtggctcccgtaggcttacttggttccgtatcgatccctgaagaacatatgcttccttaatgtcccgcttatgtcccggtcgatgcgctggatgtgctcagatgacctcttgcccttctccttcatgatctgtagggcagggccaagcggaggaagcagtctcagaacagatggaagactccctgcccccagtggcagtcagcccacagtcagcacttcgggaaggaaggacagaaggaaggtttccttctgcagaaagctgcattttggcttgttactgaagccagggagggtcaccagagctgagtttgtctgtggtgactgtgtcaccatctgtgcccagggtgttcatctgaccttcacccccagctccccagggtggtcttgacgttccctccagctggagacctgggccccgacacggcctgtcctgtttgttgtgctctggctgagcgtacctggtatcttccggggtttttcaacttcatttcctcaatgttcaggaggactgaccacatcgggccccggatgttcatgggcattcccttgtacgctcgatctatgagctgtgggcagaaaacaatctggtgtcacaggccacggggtgaccccagtgaggaccagagcccggggattctggaaattgtcggttttggccccatgattcctcagtagaggtgagatcaagctgggacagggtctcccttcccaggactgaaagagtggatggacactgagagtcgaaactctgatctgaaccttttccttccttcaggtcaccagggcatccctagccttgagctccgggtagtcccagccctagattcagattccctccctgcaaggtgacgcttgcacgaataggcaggaaatctggcgaccaggcctgcagtcctctgggcgaggacagtgtgccgcccaccctctgagaggctgatggtgccaggccacagccatgggtgcctgtcccctgtctctgcagagagtgcttcctccctccacacgttacctttctgctgcttttgtatttctcccagtctcccagcatatccacccacttgctctttcggctgatctcccgccgaatttgctgtcaaatgaggcatgttggagttagcggagctgccaggcttcccagagccgcccgcggatgctgggtcttgggctctggagccctggtgggagccagctggaaggagccagggaagggcagacctcaagggctgagagcctttgagcaaatgagcaccagtgggctggctttgggaccccgggatgtaccatcctcaggccacagacacaccagtcttaggtcccagcctctaggtggggtcctgacacaagcgcgcagccacccccaagccaggactgtggttctccttttggaattttatcaaactgccaaagtgaacagcaacctggggtcaggtccagcagggactgctgcccctcccagtgacagcgtgttgccctcacccgccaccgctcaggccagctgcttcctctgcctcactgaccacccgcccagtccctacgtccctggaccagcccctccacgcatcaggctcttaccttcgcctcccgcgcagtcagaggaggcagctccgtctcactgtaaggcaacccaggcagagctgaggaactgcacggggcctggagcggccccagcctgggtgccgacccccagaaaggactggctctgtccctttccagctcagggctcagcccaggagaaggcacagggaagggaggacaagggccttcctgtggggctgactcccaggaggggcaggacctgggagaagaaggagtgtagggacagcctggccggggttactggggcccctggcgtggggggcggtcaggctgcccagtggggctgcccgtcctggactcgaggtggtgctttctgctggagctgagaaaggttagccctgagatgggatgggggccgcccagggtgggcgaccgggccctgacaggagtccctcagggagtgaccacatccccccgccagggtcaagggagcctgccctgagacctgcccggtgtactctggctgcaccaggggcccaccccacttgacagccccaaggcccttgcaggttctgacctcccagcatccacctgcctctccctgcacccgagccacacaccctgcgtttcagaagtggcacggctcgtcagctccctcccgccctacctccccagggatcctctgtctctccatcctgtgatccctgagggatgggctcctggctgggctcctcttacccggccccagatcccttcccagcaccagacccaggtctttagccgcgagccctgctgcctccctggcctcaccgtgagatgcccagaacggggccctgcccatcttctcccccgttctcctagggctacagcccccattgtcaccatgccttttcccctcacgggacagtgagggctgtagctctaggggaatgggggagaacaggggcaggtgggccctcagagacctgctggacaacagccctgaggctgggccaggcgtcccctcaccctgtggccataacccttgcatctcaccggggttgtctccaagtagacagggccagaccctcaggctgccccgctcctcttgtgctcacttgccgacagaactgctgagcgcccaggggcctgacctagcccagtctccattcccaccggctccctagatgggccccacacctctggcctaacaacctcgggctggacctgcaggggagtcagggaggagttctgtccctggaaaggaggttgacccgacctggtgagacatgtcctgcgtcagaaaggcctttctaaaagcaaacccatccctgagctgagacaggtgctttaggggtgaggggagtgcagaggactcactgtacaatccccaaatgatcgacgttgttgttgtagcttcgaaaaggcttaggccccttgtcctctggcagcccagctcggtgtccctgtagcccagagggagccttggtgaggggtccaaggtaaagggtgcaagggcctgggggcattggccacccgtccctgccctgtgctcctagggagcccaagaccctttgaccagggcacactggaagaggcctccctccaagaagcagaccgacttgtaccttttcgtatttcataatgatgtcctctcgctcttgtgcccaccaactacccgcgacctctaccacgtccatcctgtgagacaaaattgtctaaaggtcacactgtacgcggcggcttcggagaacacctgaactgctctcgccgggctcccagatgctggctggctgcgtaacccccattccaccgccgcccccagggaaaaaggggccagacccagtggcccacagctgctccagtctctggagtctcaagtcccaagcaggggtgggcatcttcccaaggacttgagtacagtgggacctagacagagaatcctgttgtcccccaatgccatgaaatggggacacaccggccccagcaggttgaatggtttccacctgccaagggtgaagggcccatgatgggctattccagggatgtggaggcagactggggtcagcgaccagaggtctctgtgcaatcggcctcctgggatgctcagggcctcagagatgcccagtttcctacagggaacaagatctctcccgactgctcggttctactccgctcatcactttggctaccgtggctcttcagtctgaacagtgaagccactttaggaataacgcctgttgagcaggagggtgttgggtttgggggatgaggaagatctattgtacgcatggaaaccacgtctctcgcggagggactgtggagtccaccattctgagccgtcccaacaggaggaggcttcattttcctgggtcactgaggaagaacagtgggtccttggtcctggagaacagctggatggaccgtccctcctgggaatactcgaggcaaaaggagggcgaggcttcaagaggaccacgcagagcaagaaatacctggggagaaccctagtgcccggacccctttgaacacaagggaagatagtctcccctcagccagccctccagggctccttcattttccacagctgcccaagggcagcaggctcccccggacaaggcaccatgtgtgttcagtggggcccacagcgaccatcaggacccagcttagggcacagaggtgttctgaggaccgtcagtggatctgtaccagtggctctataccagtggctctgccaggaccaggctctgccccatcgggatgggaaacctgggcagatttgggatctagggcagggaggtcacagggttcaggcctgaattccagcacagcacacggcagggctgagagcaaaactcagggtcatgtccggattcccaggccggttactgcctctctgaccccagacgtctcatctgtcgaatggggacatttgggaacagcacccactctacgaagccaccatggagacgaaagagccaatcgtctacacgggcagtgtagaacgggcgcctggtgagtgctcagggatgaccctcctcggtagctgccccacagaggccaacaccgcccgcaccgtagccactgtccccaagtccgcctggagggaagagagcaggtcacgctcacctgattctgatgaatcagctggcctgggtcatgcctctcagggagaaaacctttgagtccacagagctgctcacagataccactgcctgtgtgtaactgctgtagaccactgaggcaggccagagagcagataggtgctaagcaccagtgacattctgaggtcatggcacgaatcacagtggggccttgcccgggtcagcagcacccagagtcagggtcctccgctgcctgaggcgtcaacatgcctgcctgcaacgtgtttgtgcacgtgcgtgcacacgtgtatgtgggtaaacatgtctgtgcacatgtgtgttgcttctctggccaggcccggctgccccactcatgtgtgcacccagttcctcatcactgtcacccccgaggcccagggccagcatcagagcatccatggctgctccctaacctcagccctccccgcccagggtggtcctgggatacacataggggtggagggaagtgactgctgctgttggatctcagaatacaaaagctaatactattacctaatggtctttttagtgtatctaatggtatcgctttttcatttctgatattttaactgggtatttctctccatgacccttggatattctagctagaggatcctgtggggaaagtgccgagcacacagtaggggctcactcttctagacatgttatctaaaacctggttcatctgtccttccacgcagggcctaggggatgccaaattccagggtccagaaagagcttgggataaaatgaaacttcaaggggacggctttgacctgggctgagtctgtctgtgccatccaactggagtctcaagtcctgaggcaggacgtccagatgccccagtgcagggccctcctgatcaacacctgctcccctgtactcattagcaacctcacccaccctactctcaaagcacacttggctctcgtatccaggagctctgcatctatagattcagcaacagcagatggaaaatattcagaaaataaattggatggttatgtttctattgaacatgtgcagactttgttcttgtcatcattccctaaagaatacagtatcacgaccatttatgtagcatctgcattgtattacacatcataatctagtaacggtctaacgtatacgggaggatgcgcatagcttatacgtaaatactaggccatgttctatcagagacttgagcatccatggattttggcattcccggggaccctagaactaatcctccatggataccaagggatgactgtatatactcactcaggaaggcttctcattggaggaagggcccggttcaggacagacagggacatcatccctggactactgtccatccatccattcatccattggcaccaccctctaggactgtcccaatgacagccctagcaagtggagataagaaaaaagactggctcaaatggtacagctttgaggtcttggaagatgttgcaccagtatgagaatagggggtcagtttcctccaggatccagaaagcatatcaggcaggctcggggagaggaaaggaacacggcctctccagcagccacacaggcctgcagtaggatggggctggggctggggctggggctgggactggggctggccccgtttatcacttgggcctcatgaggggaaaagaaaggacagggggcagaggaggagcatgggggcagcgggttgcctaaggagaaggcgcctcagggaaggggtattagtttgttttcacactgctataaagaaatacttgagcctaggtaatttataaaggaaagaggtttaatcgactcccagttcagggaacttacagtcatggcagaaggcgaaggggaagcaggcaccttctccacaaggcggcaggagggagtgagcggagaagcaggaagtgccacactttcaaaccatcagctctcctgagaactccctcactatcaggggagcagcaggggggaaactgtccccagatcccatcccctcccaccaggttcctcccttgacaaaggaggattacaattccagatgagatttcggtggggacacagagcccaacctgtgagggtctcaatctatcttgtagctcccctggggctggggctgagtacagttctgctggccctgctctacagcacgtggggactcttcctgtgtgcccccatctgctcttcctggggatggtggctgcttcctcaagaggagggtggatctgctctcctgcccacccctctccagggccttttggagccctggccacgtcctccctgggtaagggcaggaaaccgggctccttgcccttcttgctgcttgggtgacaatcctggggtcatccataggccccatcactgttcccgcttctaaatggagggtattttggcacatcttcctggcggggtccggggcctcatccctgttatttattctatcttggtaaagccaggttaagacatctgggcaaggagatagtagagtggcccccaggaagggtgggtggagggcctggcctttgggcttgcctggagcagggtgggagggggcaaggttaccaggaagcagggctgtcagggccaaaatcaggaggcggtgataatgctggtggggggacagggctgtgtgcttggcttggggtggggcatgagagccaaggtttgtcagcacgcagaggggtggctgactcatggactaggggctatggaacccaatggctgcccttagttcctggatcctgggagacttctggagcctgggtgtggggcagcctaggggtggaggtggggcagacaggggtaggggtaggagaggaggacttgcatggcagggtgcagggtaggaaaccagccaggggccagtttgcattggcggctcccatccccatccccacccccaagcccacccctacccccaccctgctgcagagatgggcctgggctgctgtcctctgctttggcctcagcagatcacacgatggaagctggcagccccgtgggcaccactcgagccagctgtgacctgcagtttctgcttcctggagtgtggggcgcccactcaggagagcacggcacaccccacacccctcattttgaggatgctgggaggtggggaccaaggtcctgcagccctctgcttgcgctatgaaaggtagcctaggagtcctgtgtccgcccatccacgtggggccccaggagcctgaacagtggcaggcagagagatgaggagggtgagagaagtggaaaagaaggagagagaaagagagatggggagaagggagtgagatagagagaggatgagagataaggagagagacagaggaggctgagaggaaaaggagcgagagagacaggcagagagacacaaaaggcaaagagagagacagggagagacgagcatgagtaggaggtcgggtcactctcgatcccagtccccagtgaaaaccgtaggtcgccatcacctaactacgcgtgcaataaagtcttctgcctgctgcttacagcccgagaacccttttccgagagaataaaatctttgaccgttgccctttctcgccggagtttgctcgtgtcttctgatgaactgtgatgtctcacctatcgccttcctgggctcaaggatccacgaaaagccgacgactcttttggggaggctctgcagtgccttcatctcactaggctccccaggaagcttgcgaacttggcttgagccctaagcagccgagtatgtgctgggcctctgcttctctctttcagtaagagggagaaccaagaaagaggctgaagcatggtctgcagagaaggcacttgtgcaaacaccaggagaatgaggggcctgagttgtcttcatttctcctaaaaacacgcatttcctcccaggccaccctagtgagggcatgaagcacagcgtgtgtgtgtgtgtgtgtgtgtgttcgcaggaatatgcatgtgtgtgtgcatgtgtgtgtgtgcaggtatatacatgtgaatgtatttatgtatgtgcatctgtgtgcatgtgtgtatgcaagcatatgcatgtgtatgtatgtgcatgtgtgcgtgtgtgtgtgtgtgtgcgtgtatgtgtgtgttgcagggctttacagtggacaggatgtgggagggcagctgcagctccaagctgcaagtctttctgatagaatggttaagattccctggaccacagaaagagtgttttcatttgcacctatttttattagcatttaaagctgtattcttcgtagcatgtgaagcttaagttgcttaactattcttagaaacatttacaccagcggtccccaaactttttggcaccagagagcagttttcttgaagacaactcttccacggacctgggagaaggggaagggatggtgcagagatgattcgagcccattacatttattgtgtgctttatttctatgattatttcactgtaatatataatgaaataattacacaactcaccataacatagaatcagtgggagccctgagcttgttttcctgtaattacgtggtcccacttgggggtgatgggagacagtcagagatcatcaggcattaggttctcataaggagcacgcaatctagatccctggcatgcgcagttcacagtagggttcatgctcctatgagaatctaatggcaccactcatctgacaggtggcagggctcatgcagtaatgtgagggatgggaagtggctgtttctacagatgaagctttgctcactggctggctgctcacctcctgctgtgttgcctggttcctaacaggtggggatccgatttacccagcaagataaatatattattatgtcaatttaaattattcaccttgaaccacccaaaattaccttgcatacctcacccacccaagggtcccgtagcacactttgggagctgcagacagtaaacctggagctccatagagcattccatctctccaccgtctgtgggctaacaggctgtgttagtttcctagggctgttttacagtaccacagactgggcaccttcaacaacagaatgttactgtctcgcagtactggaggccatgagtccaagatcaaggtgtcagcagggtgggtcccttctgaggctgtgcaggaaggctctgttccaggcctgtctcctcatgcgtgggtggacatcttctccctgtgactcttcattaagggtgattctggtgagggctccaaagaggagacttggacagaatgttggtagataaatgtgtcagtggaaaccagagggtagacaggactccatccatgcccagggctttctggggacagacctgtccaagcagcaaccattcccaaccgagttctgtttctggaaagccaggcaacaggtggggctgggccctctgggatttgtttagtgacccgattatgtgggaggcctgcagtgggtggttgggtggggggtggtaccaatgccatcatgcccaacctcattgcatcactcacttcccaggccctgccctcaacccctcctgaccaggccctgtcctggttctcagccaccttgtcccagtgggtgcttcagcccactcactgaccaagtgagggactgactccaggttacaaagtgctgtgttcatgtgacctgagaatacgtgtgcgcagagtgtgcccacagtgtccttgtaaagttgagcatgtacatgtcctgccagtgtgtaggcagcctgtccacacatgcctaggagtgtgactccatgtcctggtagatggggaaggagagagggagttgtgcccagggtcccccgattacttctatgggtgcatgtttgtgcttcttgttaggggtgcttggggaagattctgccctgggtgccctggatcacctgtgtgtgtgtgtgtgcacgcggggacgcgcacgtgcattagggggtgtactgtgttacagcatcctcaaccaactctgtatgtgtgcatatgtttgtgtgtgtgtgtcctacaggtgtgagcgagtggatgcttccactacgtgtctgcacatgtgtgtgtgcacttgcattgtccttgcacacctgcgtgtgtcccgtgagagcggagcccagcatgtgctggcacctgcaggaacatgtgagtgtgcgttctgtgggtccctgtcctgatggctctccacttgtcccgagtgtcacgacgacgaggatggggaccatatcttcggagcctgaggatccaacacaggtccagccctgtgcagccgcccgccaagccgccagaggacgagccggacgccgaaggctacgagtggacgattgcagttagtttccaactcgccgacttcgcgcccctccactggctccggcttgatggtcccggcttcggggtgctctcggtccctccccatcgcgtcgtcgctttctcccttggcataacccccagccgcggggccgcagaccctaagagctccatgagctctccgcgccctgcccaccggccccggccccgacccctccccagaccggaccagagaggtgggaagtttgggggcacccgctgtgggtgtcccgtttccggggctgggctccggggagccggcgcggcgcccgctccctgcccgccagccctttgggagctcaggcgcgggcagccgcttgtgttcctgggaagggcggagctgcgtcccggggagacacgccttgcagccggcagcctagtcgctccccgctggccggccgctccgtgagggccccgcagcggagggtcggggctggggcgggctggagagggggccccgggctggggccggttcggcctcccgggtggcgcgcgggccgaagaactaggaggaccgccgggccgggccgcttgtcctttggaaaaaccttggcggttcctcctctggtgtccgtggaccccgccgtggcgttctccagggccgcggacctttgcccaccggtcgcgccagctgtcctggagcagaaaggacccccctcctcccggaccgagccccgagccccgagccccatggagcaggcaagcgccggagtcccgaggctaaggcccggccggcgggcgctctggcaccttttcccgcccccgagggtgcctgtccggcccggccgggactggctgggaaaccgaggccggaagaggtcgcagtccagcaaggaatcggtttgtgtggggtgggggtgggatgggagacccctccccaaccccaccagccccagcccagctgtggcccccgccgtgtcactcagaaaaccagcgtcaaaccccagccctgcctgggatgtggaccttgcctggggagagtcccgttcaggcttttccagggcctctcccctgagcaacaggggtgtctgcgctgggcctgggcactcaccagggcctgcaggctgccagtctggagtttccctagcatcaaatgtgccaccggaagctgaaggtggggatgaccagtgccccccggagcgaagacccccccatctctccaggattgggggtctgcttaggggtccacttaggggtgtatccctcaggcattggaagtgcagatgggaggccctgagccatggtggctcccccagtccccagttctttctctgtgtaaatccagctttgcagggacggggatgtggtgcctttcccggaagagccggggtcctggggcgtggggaggctggggctgggtcgtggggagctgggactggggtgtggggaggggcccagggtgagcaagctgaagcaggactggcacaggcctctggagggcctgggggaggctggacgccccggggtgcacccttgcttgtgcactcttctaagggtcagtctcagtttgcccatctgtaaatagggttgattgtccctgccctacgtggctgttgtgagcattcaatgagcactaccagtcctgggagactcttggtgttttttattgtgctaaaatacacaaatataaatttcccatttcaaccatttctttttgctccttcactccccacccacccacccacccatttttaccgtatagttcagtcgtgctcagtaccttctaccttcacgctgtgtgcaacccatctccagaagcctcttcatcctgcaaaattgaaactggacccattaaacaacacctccccattcctcctcccccggcccctggcaactgccattctgcttctttctccacatatggaatatattctatatacctagttttacattaatatcatagatagctttgttttcagtatgtatatctactttattcttttcagtaatttcatgtttattatgtggctgtaccatcatggtttaaactatccatattttaaagagttgatttatattggttgtttttacaaacagagctgcaaacaacagcggtgtgccaacaatttttgtgtgtgtgggggggggttcttttttgtttttgtttttgtttttgagacagagtctcactctgtcgcccaggctggagtgcagtggcaagatctcggctcactgcaacctctgcctcccaggttcaagcaattctcttgcctcagcctcccaggtagctgggattataggcgcctgccaccatgcccggctaatttttgtattttagtagagatgagattttcccgtgttggccaggctggtctcgaactcctgacctcaagctatccacctgccttggcctcccaaagtgcagggattacaggggtgagccaccgtgcttggccctcctttgtttccttagatagtgtttcttgaaatagattcctagaaataagatagactgaagagtatgtaaattttaaatttttttacagactgtgtcattgctttttaaaaatgctgattaccaaaatgtcactttttgatactaaaaaatagattgttttaaacacacaaagtaagtagggcttatcaaaaagttaatatattttgcatttctcacaagtgtgttgaatttctcccccttgcattgtacagcaggaatcctgactcagtctaactttcttatacttaaaaaagtatatactaaaacataggccaggagttagcaaacgttttctataaaagaccagatagtaaatattgttctttgtgggctatataatctctgttgcaacaatgtgactccacctttgtcttggaaagctgggatagataatatataaaagagtgggagtggctgtgtttcaacaaaactttgtttacaaaacaggggtcatactagatttgttctgaggaccatagtttcttaacctcagtctaggcaatccatcaagtaattctgcattcacgatagaagtcttattgtatatattggctgactgtctttcctttctctaatgttaaccactgattttgtggagcatggattctagggaaataatacccaggtaagatgtctattaccatgtgtgtcttatttttgaaagagtggttaaattcttattgaggccgggtgcagtggcttatgcctgtaatcccagcactttgagaggtcgaggcaggcagctctctcaagttcaggagttcaagaccagcctggccaacatggtgaagccccgtctctactaaaaatacaaaaattagctgggtgtgatggcatgcacctgtaatcccagctacttgggaggctgaggcaggaagatcactggaacccgggaggcagaagttacagtgagccggcatggcaccactacactccagcctgggcaacagagcaagactccatctcagaacaagtcaaaacaaaacaaaacaaacacacaaacaaaaaactgggagaccgaggtggtcagatcacaaagtcagaagattgagaccagcctggccaatatggtgaaaacccgtctctactaaaaatacaaaaattagccgggtgtggtggcaggcacctgttctcccagctacttgggaggctgaggcagaagaattgcttgaacctgggaggcagagattgcagtgagccaagattatgccactgcactccagcctgggcgacagagcaagactcagtctcaaaaaaaaaaaaaaaaaaagtcttattgacaagttcagtagtttcttgtctttagtctgcatgtgtatcacttgggggtttggtaaaaatctagattcccgcatccaaacccagttctcttgtgagcattttaaatgaccatcccaggtggttctggaatgctcataggattgcatattagttacactatttattcgctgcatggccatggacaagttgttttaactctctgagccaacatttcctcttctgttaaatgggaatattaataatacttagcccttggagacactgttagaatttgaagcacaatgaataatttttaagagagcttgactcatgagaaaaataagcttaaatgcatgaatatatatatcaagcatgaatttacctagtgcatatgcattatacactgggtgcataatactttataaaataatcattgttttaaaaaatagagtttcattatttggggagaggcattaccgtcatttcctttctgctgacttcccctcttcagagttttctgctcttcccctcccatcccaccaccttgctttgtcacaaaacaaagccaataggatcaccaacagtttaagactggtttactcaaaacgaattcattgttttacatagctgaacacagaaatgataaataatgttctataaatatttgttggttgacagctttggaacaatgtcctctagaaaaagctgaacgtagccacccaccttgtacgagagccgcaaagaatagccatgtgcctgaatatgtgtcagccgctgtgtgactggaggggctgaggaaggggcgtagagggtgttgtgaggtcccttccgacaagcagtcaagaacgcatagaaatacattacaaaaattaaatagataagttgaaatgcatgttaagaagagccccagagtgtggttgcttgggtaggggtaggttcaggaattgaagggacgtccctagggcctgggtccctgcctcctaatttgccacaaatgtaacagtgtcttgttgcttccaggtcactcagggattcgactctgaggtcagtgatgcacttggcaccagaactcgatggggttggcacagacctgccagcctcagccactttcattctggaagctgttaaaagagacagttataaaaattgaggaatcagcaagagaattcctggttccgtgctaccttcttctctctgtcttggcaagtgtagggcctgtccacttgctcaggactctttgtccaacctcagctccctagacctttcatcagtggctcagggggtctcttcaggcagcctcttccggctaacacttcctcctgtcttccctctgtcaggggcagctcttccgtggttccttgcagaccccaggtcaggccagaaaacacctctatggcccttccctgtgtcccaccaccagataggacctcaaaggcctggggtccccaggatggccctcaaaccgactggtgcccttgcaggctgccaccctccaagtcctgcttctctctagagatgggcaggagcaccagccctcacctggcaccagcagtgagtctcataattgccatctaccattttgctagggggcttctggggatcctaggaaaagcagcagatgcctgggtgcttggggacctgggcattctgagggaaggagcagcgtgaccctgagtcatttttcactggggacaaatgagccaactccttctacccagtgataaaatcagaaggaagcagatggagacagcactgttcaggggatgatttggggatgagaagaactggcaggaagttggggatgtgggggtgagaagaaccagcaggaagttggggatttcttgtttccccacttttcccttccatttctgtttgagccttaggtttggcctccgtctccctctgtaggaattgcagctaattaaatattctgcctcttattccagctttactggtggaacataatatggtctaagaagagatttttccagcaagaggccatctctgcaaatcacctgtgaggcagacctgtggcaattttatgactcagctggccaccgggattgtagctgggttctgccgcttgttgaaacctactcagtgttctccttccctaagtaggacaagaccgtatcctgcctttaagatttatagaataaaaactgaaaactctttggggaagaaaatcttcccgaacagatagcccagggcattttgaaaatcccttaggaagttctctgtttcacttgggtacctttgtccttggactttggtgatgtggtttgaccccagccagagagtgcagggaacaacagcaaaaggcaggacaaagactgactcgtgagaggaggcccaggaacaggggggcatcgtgaatgaggaggacgtgggggcccaagaaagtgagctcttgcgcactcagtcaccagcccccttctggggtccaagctgtgtccccttctctaaagaggtaagccctgagtcatgggaagatggaaaccggggctgatgagacaggatgttttttaagcaccgtggtatcttgttgacttgcacatgcacgggggtcttgggtaaccacagggctcagggtatttgcaggaacagttcaagtgctcacttgtcttggggctgtttatggggaagtggtttccacagtgagaggacgtgagatattgttgtcaccccggaccacacttagctagttccttctcactaaagctctgtagtcatattttccctggcagagcagaaacttctatgttatcccacagctgttctaacggcgtagacttgacttatgcaatgatgccaggagtcctgagcagcacagcccaacttcaatcacacacagatggacagagctgtattagcaaagcctgagctactgagcgatgagagtacagccaggctttcagacatctgttcattcaagagagatatgcgctaagccaaggacctaaagatgtgtttaatgtgggtgctaatatgcataaggaaccttgaaataaatgttcttagcctttggccaagagggtccatgtctaggaatctattctccatagaaataaattcaaatatggaaaaaatgaacaatgcataagtgtatttggtccccagcatatttatagcaacttaaaattggacccaatttaaatgcctatgatatggaaattgctgagaaaattatgggctcttcccttaattggctattaggcagcctttacaaacaatgcagtgacatgagaaatgcttatgttatggtaagtttaaaaaactcaagatgcaaatcagcttattttaatcaggagccacctagcatttgggatgtggtcaatcccacataatgtatttttgtgggtgcagttcccaggaaagaagaggaataaaaacggcaagtatgaagtgtctccttcgcttgcagtctccttgtctacccctttgtccatccactatgaaaggactcccttctgttccttaatatggacaatttctattgaggactcattgttctaagaattgtctcatctcctcctgcatcctcagtgcccgatctttggcttctatgaaggaaggtgggcagtgcctatggcaggtccagttctacctttctcagtatgttctggcgtgggtatgtagccccattttctagtggttaccttgacatcatgaagagtttatgtctcttttgccctaggtttgggcaatagtcattcactgtgcaacaggaaatacacgagtcagcatcttattaaaaataaagtcattcaggaaagtggacgactaatagtttctaatctagagagcataggagaagaaatgtttaccacacacaaagtattagtgccttttatatcacgaagacaaaaataacaggaaaaagacaaacacattatagtgaaaacttgtttttcctaaccagcatctattctgcatgtttcctgatgcccgaaactcacatttcctcaggaaaatctcccttctgcaccattctcaggctttaagtttatgtaaaattcagtaaacccaaagattcaagttatgtgccttgattaacttaagcaaatcaatgaaacccatccccataaccacagcgacaggttaggaaattcggttcctaagtcagtcacatccgaaagggcctagtgatgtttttttccagtgggatcacagactcactcttccttgcagaaaatgaacaaaggattcatgtaacactggcaggtactggcagccacccagggcctctcacaggaaagggagatcagaaagagaagcaaagaggactcatgagataccatagggctgctgcgtccagccttgcctggagctagggccacctcgatgccctatagtcttggagccacaacgtgcatttactcaaagcctctttgagtttggtttgcttgtttgctttctgcctggaaactgccagcatcctgagagatacgagatctgcatctgtgcagagacacagggtttgttaaaagtcacaggccctgactgaagtgtggaactggctgaaatgagaaagtggtaatttggggaggaccttgtgaaatggaaggagttttaaaccttacatgcatcagaattacctggagccttgtgaaaacacaggttgctgggccctagtccattaagaaaggaagtggggcttagaatgttcatttctcccatgttcccaggtgatattcaccatgctgtcctgtctgggcactaccttttgccatacccattacaaggtattgcacgtgctggttgaactatggtctgtcttattttggtgctaaaagcctgtgccaaataccaacgctgcagcattaaggaatgtgatagaaaagattctgaatataggccaggcgcagtggctcacgcctgtaatcccagcactttgggaggccgaggcaggcagatcacgaggtcaggagatcaagaccatcctggctaacatggtgaaaccccgtctctactaaaaatacaaaaaattagccgggcgtagtggtgggcacctgtagtcccagctacttgggaggctgaggcaggagaatggcgtgaacctgggaggcggaacttgcactgggctgagatcgcgctactgcactccactccagcctgggcgacagagcaagacttcgtctcaaaaaagaaaaaaaaaaaagaagattctgaatattggaacttagtagctatgtattacatcagtaaggtcctttaagaaagagtttaggctgctttgaaatgggctcatctgaaattgaaaaaggaagaaattgaacttgctaaaaaaggcccttccaacttattgactgagaacccagtaatctggagacttgaagggctgtaatggcagaattttctactctaagataaagttagcatgagcagagacaggaagatgagagacctaatgaggccaagggtcaaatattcatcacctccacatgggccaagatgcaggcagaggtctctcaccagggacttggtggtagaggtgacactggtagtgaggtctgtgctagaaagtgcacatccctggctgggcgcggtggctcacacctgtaatcccagcactttgggaggctgaggcaggtggatcacgaggtcatgagttcaagaccagcctggccaacatagtgaaaccccgtctctactaaaaatccaaaaatttagccagatttggtggcaggcacctgtaatctcagctacttgggaagctgaggcaggagaatctcttgaacccaggaggctgaggttgcagtgagccaagatcacaccattgcactccagcccaggagacagtacaagactccatctcaaaaaaaaaaaaaaaaagaaaagaaaaaagaaagtgcctatccccaaccccatttaaaatgcaaattcgagctttgtaactgaaaacatctctgcttctggctacctggcccatggaattgatcagaagcaaatagtagcctatggacattagaagggagtcacattgccaaagaaaccacaagactggttccaaacagtcgctgattacacaatacctaaggcaacctcaggctaactcacacagacaggaagtcagcagcctccagaaagcagatcctccacattgcacatctcagattgtccgtggaggacattcccccagggaggagagctagggactgccagatcagctgaactgcttaaaaatgcaattcccattctccagttccctaacaggagtctgtgtttaacttactctgtttgttcataacacttgtatttagggaatattgggcatgattaaactttgtttagctttgggtttctggaccttgtgaaacaattcagtgcaggcaaatattgtattcccctatatttttttcctgaaagtcaataaagaaggaatgatgacaccttcactgcatctatggggacaaaagctgctcgtgtgtgtgtgtgtgtgtgtgtgtgtgtgtgtgtgtgtgtaagagagagacagagaacagccttgtcaaaaggatgtgtttgttgctgtaccctcattatacgaaagccatcatggcatcaaaatgctgtaagccaggctgagctctattctctctgcatcaactcagaatccctaccagaaagtggttgtgatggatggaatatcacccatcaaagaacagggtaagatgagaccagagaggtaagctatgcaagctaatcagaaaataactcaaagttttaaaagtgcagaatataaaaaggaaaaaccctcattcctaaaaaaatttaaaaaaagcctcatttcctcaaagaaacgacagttagctatttgatgtgtgtctttccaaatatttgcctatgtaaatatatgtgtgtatatggcttttaaaaataaaaacaaaataatatcctttacagacagttttgtagcatatgtagagaatatatatgcatatactgaatgtaaatagatatgcattttacctagaatattgaggacactttccacagttatagatgtgtgctgcttttgtttactgactgcagaatattccattgatggacatcttaatcctctacttattaatcccctactgatgactgtttgcatttctttgctctttaccaaccatacttgaaagaatatcctcatgtctacatattcttatcttttggcagtgtttctatgaagcagattcctagaaatgggatcaggtcaaatgggatgtaggtcacatagtatgtgcattttaatatctgctaagtagtagtgtttaattatgctttaaagagtttgagccctacaattctaaacatgtttggacacagaaattagattattttaaacaaaatgaaataagcatagctcataaaaattaacacgtttggttttcacacaaatattttgaatttccctttcttctgcaaaaaggaccctagcttagtatgcatttcttgtacatataatgcaagcaatccatctattaaataacttacctttcaaacctatagacagcatcctgctccacacagaagctggttgtcttttcattctctaacattagctatttattttgtagagtgtagattctagagaaataatgtataatacacctgttgccatatgcagagacttaccacatttagaaaacagtggtgaattctattgacagtggctctcagtcattaacatgctatggaacacctcatgagcttgataaaaatatcagttcccaggtctacacctaaagatcctgatgtaattggcttaaataatcactgctgaaacactctatgtcaactcagaatcctgacaggaagtggttgcaatggataaagtatcatctgttaaagaatggggtaagatttgagtataggcgggtcatactttgggaaataacttggtcaatggttaacagcatagtctgtagttcaataaaagtccagttttggaacacaattgaccgtttacgtgctgtgtaacctcagccaagttgtctaacctttctgagccctgggttacttttctgtcaagtggaggtattaatagtacctaagctgtactattgcattggtaagattaaatgaacaatgtataaaaagcactcagtaggaggagtaagcctcaacaatgtaaataattgctattaagagcttgattcatcatgaatatgccctacagaatactctgcttaatggtggccattcaagtagttaattctcctagagcgtgcatattacgatttgagttataacatattcgtagtttcaatgttccagaattttgtgaagtggataactctgtcgcagcgctccccatctctcccaatttccctccatttcacctcttcctaatctttgcctatgattcctcttaaccagtgattttgatttgccagaaaaacaaaaccaaactcaatactggtttaccgtttaaaagaacatctttattatttccccaggccgatcacagccctgaacaaaagcatctgatacacatttgtcagtctggtggctttggtgccatgactgcctacacaggccgatgacagccactcggttgtcaccagacacactgtgagggaaggtggaggggacagggggaactctcagagcaaacaatcacaaacacactgtgaaatcaaaaataaattataaaaactaaatagtataaataaattaaaatttaagttaagaagagtcccacagtgtggctgtttggcaataaccagtccatagaagaggtagctgtggaggtcacacgcatgttcccaaggctcaggctcctgctcctccccactgggcccactgaggtcgctgggcctcgaagcttctggacccctcaggcactcagctccaggtcactgacgtatttctggacccactcctcactggggtcagcacagacctgccggcctctcttggttaggaagctgtggagaagggaggaagagttaagcactggggaatccagccggggaatcctgggcccaccatggccctgacatcctgctctctgtcctgggcagctcaaggcctgctcctctctcaggggccccctgcctatctccgtctagagagcttctctcagtgactccaggcaagggggccctcagagtgtcctgctgcctccttcttcctgtccctttcctctggcctggggcagcccttcctgactctgtaacacccacctcactccagccccaagtcaggtcacacctcagtgccctgcgtcctgtatccccgataggctcctgaaggctgggcctttccaggatggccttctggcctgtttctgcccccaccctgacactccctacctccctagaggtgagcaggaagactggcacttacatgacactgggcttggagcactggctgctcgtctcaaagtagtcagctatgaaattctgtggaatctgtcgggaggtgtagctgaagcagcaggcggtcggcgtgtcagcagcaactgcggagaaaggagagaataagcccgagtcacagctcagaagaaaaggccaggcagcttctgatccctgagtggttgaggagggcaggcttgctcagaccaagtgactgcaaggcatttggggggttttgcagagaaatgtctctttgtttctgtctatattcctctttccccttgactcttcatagtgggttctctgtttctctatgtgatccagatacctgaatggactgttctcttagctctcttcatggaattttgtcggttcaagaagtcataccccagcccaagagaagccctggacatctctcataagacatccaagggacagggctcctgggagacctagggtgagctggagagtgaagaacagaccccactgggaagtaagcagccctggattctgcctcttgcaaactgattcgttttgaaccctgtttttctatctgtacaagggactgtaactcccctgcccctgcctagattctcatacctggagactaggagggctaagaccccttctagagataaaaataaaagttgtgaagaaaaagaccaaggtgtttggcagcgctttaagaacttccttcttttctcttcggggctctcaggccacaaaaaaagactgatgtggtctaaccatggccagagagtggtgatacccacaacaacaacatggactcacgtggtgcagagaggacctggttgcagagagccatggtgcagaggaggacggcaagggcagcagtggagacctgcatgattgggagcaggtgatggaatgtgggctcgagtgtcagcagagccaagaagggactgactactctttgctgcctgcgtccttctgatgtctgaagccatctctcctctttataggcagccctggcggatggggaaatggaatctgggggtgaggagggaaatttttaagtgtagtgatgctgtcatgctgagtgttgcacaactcagggtccctggtgaccacaggggctcaggatatccaagaatagcatctctgagctactctctaactctcagctctcaactcatgactggttctagcttcatggggtttctcctgtgagtgtgaagaggggtgtgtgtcaacccaaggctattcttagttgatcccttctcataagaactggtctatgcagccaggcatggtcgctcacacctgtaatcccaacactttgggaggccgaggctgcagatcacctgaggtcaggagtttgagaccaacctgaccaagaaagagaaactccatctctactaaaaatacaaaagtagtcaggcgtggtggcacatgcctgtaatcccagctactcgggaggctgagggcaggagaatcgcttgaacccaggaggtgggggctgtggtgagctgagatcatgccattgcactccagcctgggcaacaaaagtgaaactccatctcaaaaaaaaaaaaaaaaaagaattggtctatgcatgaactctccagccccattccttcccacagagctgtaattctgcttcctcagctgctataaccacaaggatagggtcaatgggctgatgctgtggagggctagacaacccccagtcctcccagaggaaaggaactcaatgaaagctggaggaatagaaagcatgaggtcacgtttcagtcatttgtctatttattagtctcggagtgactggggcgctgtgttaaacgctagttgtggatcataaaaatactttagaggtgggtgtcagtatgtcaggtgcctagaaatatgtgtagccattaacctagaaaaagcatttctgggaaagagttctgtggaaacaacccaaatatggagccatcttcaaacataaagatacctgacccagcatcatttataactctaaaataagcaaagctaaatttttctctatcagggaatgataaattatccacaagatcctttattattaagtctctaacgtgaatgaagtggcataaatatgcttataacatcagtggttaaaaaaaaagcaagataaaacattatacaaattctataaaatttgaagaattgtataaagatatatatatgccatgccaactctaggcatggaaaaaattaaaaggcttggaaatacatgccttaaagaatgaatagtgcttagatccatgggtgatttattttcttatttttttctttttctgaattttcctcattttatttagtgagactttattaccttcttggtcaacccacaaatttatgaactaattttgttttaaaacatttccaacatcactggttgaaaagtgggttgttgtcagttgtttaatctgaaagaaattactgataaatatgctacagtttctgttcaatgggctttgccaaaatgaagtcttgatttcccatttctttgaaccattttaaggatcctatactatacttacataaataatgccaaactgaagcagttttttccttattcttttcaacacataatttcagtggtgtggaagggtctctaccttctcagccagattatatgcttttttttttcttttccatactttgttattttattattttgcaatcaatcagcatatctcattttataatgagaaatagatttagttggttttaatgatctttgtttctgagatgcccctggtctcatgggggcaggtagagtgtatgaacaggtaattgtaaaactcttagtagaaaaagaaatgaaagctcagaaccccatgaggaagaagtgaccttccaccagagggttggggaaggcttcatggaagggatggaactttagttgtgtctggataactgcccgggatttaggcatctatagatgggtgggcagtggaggcccagctgaggcagagtcctgggtgtgacattgtggctcagaggaaagagggggtgcttcagtggagctgcagagcagtgggggtgaatatggatgataaaggtaaattgggaccaaaccaggacaggccttgaattccccccaaaggggttagagttgacacacttgatgctggagaacaacggaggacagaagccaagtgggaccacgcctttgaaattctgtccttcctgagtgtctttagagttaggtcttttaatacacatgagctctgtttccattccaccccagtgatggctagtgccagtcttgagggaggagaagcagaggcaagatcaggggccgtggtaggtttcatcagagctttggcatccacgtatcttcccctattgctaccaattccaaataaaggtatctctgccacttgtctcattagaaacctacatcacaggcaatgactccttctcaccccaccctctgcctctcagctctcgttgataccctgaattgcgttccctcactcacttcttaggggaaccccctccatactcgtgattccttttctgggagctggcttctgtgagttgtggagagtgagaaaaggaaatggaaactgctgaatcagtcagtgttctgataagggacatcctctatctctgtgattacagtacagtgtgttataattagttacctatgtaatttgctcttcaaaaacctagaccatgtcctgttgattttattttagtttctttttctcaagaaatttatagtttaataaaggcaatgtgggagtttggaaacaaactttgattttgtactaatgatagattagcaactacacaaattttagttcacaataagtaatatttatcgagtgatcaccatgtgctgatttccataatatggatttacatgtttgaactgtcttcaaaacaaccctatgatttagttaccagtatactttcttagttgaacaggtgaagaaaccaaagtaaatagaggttaagcaattttccgaaggccgtaaagctgatgactagcagagcagggattcacatccaggtagtctgactctaggtaccacacgctacacgtcctgtaccacaacttattatatttgatcctcataccaatcctataatggtagattttttagagtgtcttctcagattgtaaaccaactccagaccatgtctcgttggttgatttaaaccaaatcctagtacatgatgattataacatgatgaacctcctgacctagtctctatctcttattattgtgttctttataataaagatgatttattgaatatataattctatctcagtgtttatatatttgtaagactttctctatcaatccccaaaccaggaaatagccctttgccatgtgttttggcttggagtaaaatatagttgcacgcatagcatttgcttaatttatatacgttgaatgaataatgtaagggagatgtaggacggggttgagttgggagggtcttagacatttcctaggtggtaaattgatgttcccagttgaaatgacgtacccagggtcatgcaggtggaattggtcagttttatattccactgtctgtgttagttaccagtgtatctccagtgataaccacaatgcctgacatatagtgaagcttaatatctatttgatgaataaataaatcactgatttgactaacaatatgtgttatgcctgaactctcactatggagttgaaatactaatgggaaaggtaggataagaaaggccatggtgagtgggaacggggagaggatcaggaaaaacaactaatgggtactagacttaatacctgggtgatgaaatcatttgtacaccaaacccccatgacacaagtttacctatgtaacaaacctgcacatgcatatctgaacttaaaataaaacaaacacacacatacacacacacagaatcaggagagacagtcagaagcatgacaggtctccagagccaaggaagaatttttaaataaaatgagaattgaagccaggcacggtggctcatgcctgtaatcccagcactttgggaggctgaggcaggcggatctcctgaggccaggagtttgagaccagcctggtcaacatggtgaaaccctgtctctactaaaaatacaaaaaattagctaggcgtggtggcacatgcctgtagtcccagctactcgggaggctgaggcaggagaatcacctgaacccaggatgctgcagtgagctgagatcgcaccactgcactccagcctaggcgacagagcgagactccgtctcaaaaaaaaaaaaaaaaaaaaaaaaaaagaattgagggtcccaataaagatacaatttgaaagagaaatgtaaattaaacttatataaagaagttttcagtaacttggatctaaaagtttatgatttgctttaaagataaaggaaagaaagaaagaagaaaaagaagaaagagaaagaaagaagaaagaaaaaagaaagaaagacgaaagaaagaaagaagcaaagaaggaaggagagagagaaagaaaagaaaagaaaagagaaaaaggccatggtgtcacagttttgatctttgggaaactgaccacccaagattccttaggtggtggtgacagtaagtagccagcagtcaacaccatggacccttcagcatggagggatttgatttgtgtcccagcgttctggctcatttcagcctctgcgaggccccacctcagtccagcagagcgtcccagtccacagtgcggggaatcctggctgggcagtttgtcctctgcggcgtctttgccttgcgctgctcagcttgcctccccactgtgtgctgctgcctgtgctctccagtgcggagcattgctttccttccagattctggccccgaggctccacttccccaagtgtcaccctcctctatctcctttggcagcaggcgccccagggatgggttcactgatgatgacatcctgtttggcccagctttggcctccttttctcatatgtggtctgcgtggtcaggttgcagcaggtgtgggccccacttttcatgcaggcagaagcagcagcctggagtcccctgtctagtatcttagacagacaatgtctcattgacacagccccttctttctgcagccagccccttgtttcccgtcctgagtccttgttattttctctagccatttcttgcatgtgtgcagtaggtcagggcgtatgtcttggtactggatccgatccctctcctggtcccttgccctttcttccatattctctacccaataaaaagtgcctcttcctatcagtcttccagtccagaaagctgagagtcacccttgtctcctctttctctgtcatctcctacagttattcaatcaccaactctagtctacattcaattttacgtgcatctgcctctcaccattcccactgcctctgtcttaggtcaggttcttatggattctcaccatgacaactagaagagggtcctagcaactgctttttcttccacttttgtctctaatttatttatttattttgagacaaggtctcactctgtggcccaggctggagtgcaatggctcgatcttggctcactgcaaccttggtctcccaggtcaagcaattcttgtgtctcagcctcccaagtagctgggattacaggcatgtggcaccacacccagctaatgttttgtatttttcgtggagacggagtttcaccatgttggccaggctggtcttgaactcctggcctcaagtgatctgcctgcttcggcctcccaaagtgctgcgattgattacaggagtgagtcaccacgcccggcctagttttgtctctttttaatctatctcaccatacagcatccaatatacttttgctaaagctcaaatcagtctctgtttctctccttttaaaatcttgcaaacattctgcatcgtttctgacatgaaatggaagcttctctgtaacctgacccctgtctacctctctggcctcgtgacttgcctgctgagacttcctgaaaaccaagacccagcctttttgcactacttgtggttccttaaatgtgcagctctctaccttgcttttaatgaaggaggtgcccacttggtaaagcacaatttcaccttcttgtaaaccacagggcagagtgaaatgctatgaatgtgggcacatcccgtgacagctgcagggattcatatttagaacaattaaggaaaaacattatgtaatttcccatcttttcttttcttcttcttgttgttgtttgtctttttttgacagagtctctctccgtcgcccaggctggagtgcagtgggggcgatctcagctcactgcaacctctgcctccccttccccctccccctgggttcaagtgattctcctgcctcagcctcccgagtagctgtgattacaggcatgtgccaccatgcctggctaatttttgcatttttagtagagacagggtttcaccatgttggccaggatggtcccgaactggcctcaagtgatctgcccacctcagcctcccaaagtgctacaattataggcatgagccagcaaacccagcatgtaattccccaaattttctaagaaaaagagagaaatccatggatcttgctgttcaaagacatgcaaaatgcacaacagaaaagacattttacaccagaataacagaaactttggttgttatgcttttaacataaatttataatacagcacacttcccttttctgatttattcatgctctagagccagacttcttggcttcagtttcaaatctgctgtgtgtcagctgtgtgtttttccataagttacgtacctctctgtgcttcagtttcttcgtgtgtgaaaggggatagttacagcacttaactcagagggccactgtgaggattaaatgcattaatacctatgaaaggccgagaacattactggttcatagtaagtgctatctactattattactattaccattttattattattgaaatatttcaatacctccattttatatccgaaacaagtgcaggtctcttgttctttgcctggatacccctatccctgtctttgcctggctaatttcagtttaacctataatagagaaaagttagagcaatgtaaatggactgatgtgaatgattaaatacaacttttggtatatctatgcaataaaatatcatgtgtatattcatgccatttttgagtaatatttaagtttgtaatggcacagaagaagactaagtagcaataataagatatactaggtcatgaaagaatattaagtaccaatagtaaaatataaagctaggtacagaatgatagggcaattttaattttcttatatatgcttccctatattttttcagttttgcaaacgaccacgtatactttctataaaagaaaaacaaactgatatatatgttagttataaatatatagatataatacatatattagttatatatatatatattatttatttatttatttatttatttatttatttatttattttgagacagagtctcgctctgtcacccaggctggagtgcagtggagctatctcggctcactgccatctccaccttccagtttcgagagattctcatgcctcagcctcccgagtagctgggactgtaggcatgtgccaccacaccaaactaagtttttgtatttttaatagacgtggggtttcactatgttggccaggctattctcaaactcctgactcagatgatccacccatctcagcctccgaaagtgctgggattataggcatgagccagcacccctggccataaattttttttcaaaaaaaaaacaaaaacagatctcaaattttttggaagccctccataacacttcactaccaccatctaaagtgcttaccctcgccctcggacacaatgcctgtcacacagtaggtactcaatacagctttactgaattatgttcatctcttgctggagtattccctatcgcctgcatggaaaaaggccagaaacaatttgaaggaagatgcttcacaaggaatactgaaagttttcttgacctcatgaatgctggtgaggctttacccctctctcaggaatttaacatctcctgaagttcctgacctctgcctttcacaactaagagcaggctgtggcggtgaccaaggtccatttccatggtaagaagagtggggctggccagctctgtagtcagagtgtggcagtcaccgatgagctgctccaaccgctcactgtcctatggaggcagaaatttaaaaaataaatatgcactcattcattccaagaaaataacaggcaataaaggagaagttttcctctgcctagcaagctcgcttcaaggacagttataagataacgttgtttgagaagtcgaagccaaaggaatgggctccagacaccccacctccataacaagtctgaagaaaaaaaaaagggacaaatgtctgtatttagccagttctgtttttctttcagtgcagctgtaaggccaccagctaagcaaggccacaagttatgctatgctatagactatgggacctatcattatatgattaactgctttagttttgcttctgcaagcctgcttgtaaaaccccactctgtctttgttgaaatgctccaaatgctcagctttttggatatgaattcactgagccagtgcacaccttaaaataaatatcctcctgttctcccatattggtctcttcattcctcagtttactacagcattacagatttcatcctgaagaatgctgcactctggataattgtgtacttgtttcttcaatccacaattcagcttctgctcccatttcccccaaagtgacttggataccatactggcaaaaccacaggatttgcctcgtcttggtttcttatcttggcaaaatgaccctatgttccagctccccttgggtttccagtctccacatttgccctccaggagttctctagttctaggcatccacctcctggaggccacctcttggccccaacactcagaggtctccccaacactctaggagaggccaggatgtccagattgactgcctctctaccctgctcctcagcactttggtaatctcttctgagagtctgttattaacagagattgcctatatgtgtaatctcagaaggtcatacctgtagagggactctggtcatctctgaactgggaattgtaggccttgggtcttgacatgcatcctgtgtgaccttgatcaggtcttttcacttctctaggttttgctttcctaatctgtaccgtggcaaaacagatcagggtcaggtaaaaccacaggccacggatatgctgaggaaaatgaaaaataccagggcattttcaaggtcatgttactgctgtggctgctgggcctgtctgcagcctgggaggttgaggacaacatgacaagacaaatgtaaaaatgcccagaatggagttatgaatatagtggtggtcaaggatgtgggggggggaacctctaaatgaccacaagtgagggggaaagaagggcttccctgctcaggggtgagagggtggccctctgaatggagctccctggaaccatggatgacccttgctgtcacttcttgcaaccctgagctacaaagagttgagtccaagaatagtatccattatgataaaactactggatgcgtgggttgagggtgggggagaaggggaagtaccacactatcagggctgaggaatcaccttttgggtggaatgtcagaacacccagttcattcatacttggtttactcatttggctatataggggtccacatcttgagtccatattactcatcacatcccctccatggagataagcataacatagtttctgcatcaaggagctcactttctagtcggggaggaaaccacatgaatagataaatatgtgataggtggtaagaaggaagtagttcaggagactgtaggagcacagtgaaggatacagagtttacttgggaaagagatcagggaagtttctctagagaagatgaacatcttttttgtcatgtatttgagaatcatttgtttattggctcttcttggctttccggtctccacgtttgccctccaggagttctaaatggcaccagtgtctaaatcttgttgggggtggggggtaagttaatattgctgaacaaaatgatacaagtcctttttactctcagtgtggacttccactggtgcagacatagtattgttgttaggatcttcatgaagatccatcaaaacgttttacccccatgagccaaagatcagatcaaggcgaggaaacaaaagtcaacagacaaactcattgtatggctcagtgatggctaatcacccattttatcaatcattattctcctgaagccccagaacaggcttcctcctaacccctccaccctgctcattcagacagctgctctagtgggaattgagacttaacttgaaactactcatctacagctaatagacagccttctccatccttcaggcttcctgacactttgtttcttcctctgacatgacacttagcttattccacctcttgggatagttatttctgtcactgtcaatgccatcactagacatggaactcttcgagggcagggatggggcttcgttcagctctgtctgccctggcaaagagcagatggttagtacattgggctgaacaaaaatgtcataaataacgaagtctgcgtgaatccagagaacatgaaacacatactgcttcccttaaagtgaggtccttgatgcatgaagatgaaactgcaccaactaggaaaggccaggagaggtactaacacatctgctatcaggcaacacggaacattacagctgggggcgagggtcttggagaagatcagaacatttgaagcaagagctgtacaaagaaaagggggagagaacagatgagagaagtgcagcttgtgtgtgcgggtggggagggagggagagtgctgaggcaggatgaccttgtactttatttaatgaccctgaagtaccccaggatgctgctccaacctctcctgtggctcccagatgctgtgggtccctttttttcttaacttgtattttaggttcaggggtacgtgtgcaggtttgttatataggtaagttgtgtgttgcggggggtttggtgtacagattatttcatcacccaggtaataagcatagtacccaataggtagttttttttatcctcaccctcctcccacccttcacccttaagtaggccctggtgcctgctgttcccttctttgtgtccatgtgtactcaatgtttagcttccacttataagtgagaacatgcagtatttggttttctgttcctgtgttagttcgcttaagataatggcctccagctccatccatgttgctgcaaagggcatgatcttgttcttttttttatgactgagaagtattccattatatatatatatatatatataccaaattttttttatccagtttaccatcagtgggcatttaggttgattccatgtctttgctattgtgaatactgttgcgatgaacatacatgtgcacatgtctttatggtagaatgatttatattcctttgggtatatacccaataatgggattgctgggttgaatggtaattctgttttaagttctttgagaaatcgccaaactgcttcccacaatggctgaactaatttacattcccaccagcagtgtataagtgttccttttctccacagcctcaccaacatctgttattttttgactttttaaaaatagccatcctgactggtttgagatggtatctcattgtggttttaatttgcatttctctaatgattagtggtgctgagcattttttgtatgtttcttggccgcgtgtacgtcttcttttgaaatgtgtctgtttatgttcaatgcccacgttttaacggagttgtttgttttttgcttgtacatgtgtttaaattccctatagattctggatattagacctttgtgagatacatagtttgtaaatattttctcccattctgtaggttatctctttactctgctgataatttcttttgctgtgcagaagctctttagtttaattagatcccatttgtcagtttttggttttgttgtgatttgtttttggcatcttcatcatgaaatatctgccagatcctatgcccagaatcatattgtctaggttatcttacaggtatcatatttttatagttttatattttaggttttacatttaagtcttcaacccattgtgagttgatttttacagatggtgtaaggaaggggtccagtttcaatcttttgcatacagctagccagttatcccagtaccatttattgactgggaagtcctttccctgttgcttgtttttgttaactttgtcaaagttcggatggctgcaggtatgcagcattatttctgagctctctattttgttctattggtctatgagtctgtttttgtaccaaagccatgctgttttggttactgcagccctgtggtatagtttgaagtcatggctccctttttttactcttcttttttctttctcagagaagagcaggtaacaatgtggggttaaaggtgagcaggtgggttagagtagtggagctaaaggcagatagaggtcttgatccaattatcctcattcccttcatttgtccaaccttgcacactcctgtatgcagggcctttgtaagcttcaccttctgtacaggtgcccagcaactgtcaaaccagccagggcttaacatgagcatgggcattccctatggactggctgggacacacccacatccttagattacacattttgcctgtaacatagataaactcattactaggtatataattctgttttgttttgttttggtttgttttgctttgttttgttttgctttgctttgtttttgggacagggtctcattctgtcaaacaagctggagtgcagtggcacaatcaccactcactgcagcctggactttcctgggctcaggtgatcttcccacctgagcctactgagcagctgggactacaggtgtgtatcaccactcccagtcaagttttttttttgtatgtgtgttttttatagagacagtgtttcaccatgttccccaggctggtctcaaacttctgggctcaagcaatctgcctgccttgacctcccaaagtgctgggatttcaggtgtgaggccctgtacccagctcaattctgtttttatactagaagaacattctctatctgggtcttccagacttgattcttactggttaatttgtcctggtcttttgctggtccaagaaaatatcttgaaatctttatttcttctccgttccctccttgtcctaggacagactagccctatcccttccctgaattaagtctgagtataatcggtctttgagtgtggaatagctcctagcagtctatcagtcaatggtttctctttgtggtcacactctatgtttattctggagactacagcatggaaagaaaatggactttggagtcagatgaatcttgattcgaatcttgattcaaatcttggcagtgccattcatcagctctgtggcattgagcgccatcagtggaccactctctgatccccaattgccttatctgtaaaatgagattagacacccctgctcaagattatggtaggattatatataatatgtgtaacacagctttcccagtgcctggtacaaggtaagtgtccaataagaacttacaaatgttcctgagccaccctactgggtccctccgcacatccaatgctggactcttcatgcccaaggaaacatatagggcacaaaagtcagtggcactgagctcagcagaagaaggcacaggaaggggatgggggagtcctggttcccgctttgttcttggggccaggactgtggccagcctggaaagactggcatgaaccctccagcatctgggggtgccaaccaccaagagcagcacagttcttgtctacaagccacttgtagcaggtgtgaacatttcatcttttcctctggggtttgcaactctctccccagtctcggtcactgcttttggctgtaccacttcccttttcttctcgcctgcacctccctcatctttcctctatgatgacatcgccctggggaagagaagctgagaggaactcctcactcagctagcttcaggagccatgacatcatctctaccatggaaattccactcactctcctgtgcccccacatttgtcctaggcctcagagtccctataaagagagattcccaactcagtatcagcacaggacacagctaggttctgaagcttctgagttctgcagcctcacctctgagaaaacctctttgccaccaataccatgaagctctgcgtgactgtcctgtctctcctcgtgctagtagctgccttctgctctctagcactctcagcaccaagtaagtctacttttgcagctgctatttcgagtcaaggtgtaggcagagtccttttttctagtcatggctggcaaacagtgggatctggggatgggacaaaaggcagctaggaagattgccatgtagtctgctgctaaatgtagagtctagtagatattcagtaacattcaagttcctattttcttaagaattagcaaccagcagaggaaaacgatgggctggaagtcagactgttgaattggctctgcctttaattatttgttcaagcaagcccctgtccctctctgtgccttggtttccccatctgtcatatgaagggagtgcgatgtgttctgagactgaatccagttccaatcttctagatttctttctcgttcttctctgaagatccactattcagaataagactcctgctcatgttaggtgggaatggatacaagggaccatatttggggttctggtagctccacagggatgctcaatgaagatgcaaaattagaagtcaaaataaacagctcccatgggcagtgttgatctcaccctggcctttcctttcagtgggctcagaccctcccaccgcctgctgcttttcttacaccgcgaggaagcttcctcgcaactttgtggtagattactatgagaccagcagcctctgctcccagccagctgtggtgtgagtatcaacccctggctgccctgggaggcaagggtgagggctggatttttaaagggggcctgttttggggagggggtgatgagcgttggggaggcagctctcagggctgaagccttccctgacagcagtgaggtcacaggtcatgaactcacttttcaagtgctgaaggcggctgagtggcagccgagacagaagggggttcctggggaggaagttattcagaggacagggaagcaggggaaggcagacaggtcccgtgagatatggaccaattccttaaaccatgctagaaaaacatgtggaaaagtcactaccaggctggcagggaatggggcaatctattcatactgattgcaatgcccactggttcctaatctgggcaacccctggggcccacagctaaatccagtgagtggaagttacagggagtctgcttccagtgctgctccgggaaggatcccatccaccagagctgccccacatggaccatggtcaggcagaggaagatgcctaccacaggcaagggataaagccagatgacctcaaaggtcccatgggattctaatctgtctgctccttgttctacggattccaaaccaaaagaggcaagcaagtctgcgctgaccccagtgagtcctgggtccaggagtacgtgtatgacctggaactgaactgagctgctcagagacaggaagtcttcagggaaggtcacctgagcctggatgcttctccatgagccgcatctcctccatactcaggactcctctccgcagttcctgtctcttctcttaatgtaatctcttttatgtgctgtattattgtattaggtgttatttccattatttatattagtttagccaaaggataagtgtcccctatggggatggtccactctcactctttctctgctgttgcaaatacatggataacaccgttaattccatgtgttttcataataaaactttaaaataaaatgcaaacagtttctttgtgattttaatttgatttgggggtaaaaggaattgcctggtaccattgggcggtggggcaagctacagtttccaaaagcagtaagaatgcgcaattgctgagtccttaatatgagctctgggctgaacactcttaatacatgatctcactgcgtactttcaacaagggttttaacacccttatgaagtagggactgttgcccccagtttcacagttaaggaaagagaggcacagagaggtgaagtgacttgctgaggctagtaggtctgcttggggagtgtcatgaaaaaatgcctttaaaaaggaggttatcatttcaacatcttgtggggggagttgtaaagaggggaagcagcacagcaaaggcggaagaagagtgagaaaagtgacttcatcatattattatcagcataacattgggaaagtcatcttgctttattagacctcagtgttcacaagtgtgaaatgtagataatattaaccccttcgaagggctgttacgaggtgatgtgtaaagcacccatcatgggactgggcacctggaagattctctccttccccctctgagcctcagccttttcacttaaaatggacctaacaattgtcaggatcatcatgaggattagattagttagttgacagatcagcactctaaagcccaagttactgtgaagtgttgtcatgatgacagaaggatggaggtctggttttgtttggaagtgttgcaggagtaacctaaagccacttctacttaattatccttcaatcagtactcccattccatgggtcagagactacatggctctgaaattgaattacatgcacaataaagcctgatccacaggacatagactcatggtctactaaagctaaaaggaaactttagaccatctggtccaaccctctcattttatggaaactgagggagaaggcctgggaagtaacttgccacgtgccactcaacgagtacatagcagagcaggagcctggccagtgccagctcccaagctcaggccctttcctgcacacattccctagtgacacacctctgtggtcctcaaaagggagaccggttgagtaaggacaaggcagagactaccttgaaaatcatttgagtgttgttagtcctgtgcaaaagcagaactggggccctgtacttctctggggtcaacagacacaattcctttctttgtcctgcccttagtcacctctgtcattccagagccccagtggaaacttacttcagattctgcgggcactgagagaaggaggttagggggcagagctgatccaaaacaggtgtgggaagaggctagcagcaaagaatgtgcctggccatagtttctgctttcatttgcctagatccgagctatctaatatgttagccactggccaaagcggctatttacattttcattacatttaattaaaatgaaataaaatttaaaatttagttcctgagtcacactagtcacatttcaagtgctcagtagaccttggtaacatggctagttaccaggttagacagcatgcattatggactttctgtccatcattgcagaaagttctgttggagagcagtctcctagaatgttctcagagcctaaagagagtgaagggaggagcagttgggatggtctgtaagattagggtgcagatttggagaaagatacacaattctattctgaggggacgggatgggagagagaatggatgaccccaagccagagacaaggtatagatcactatggtagctgaataatggcccccaagacatccacatcctattccccagaacctgtgaatgtcaatttgtatggcaaaagggactttggagatatgatcaagttatggatcttgagatggagtgattaccttgaattatctggtcaggccctaaatgtagttgtgagtgtccttaccagaggaaggaagagaaaaatttggtaatagaggagaaggtagcaatgtgacagcagaagcaagatgctatgctaccagcttggaagatggaagaagaggccaggagtgaagaggttttaggatgcagctctagaagctgcaaatggcaaggaaattgttcctcccctagagcctccaaagggagtgtcccagtgaatctaatttcagacttctcacctccagaacttttagagaataaatatgtggtcataagacactaagtgtgtggtaattttttgcagcagcaataggaaacaaatacaaccaccaactgatgtgtcactgatagtgacccccaatagctcagtgtggcaggaaagggagcattctagagggtgagccaaatctccctgcaggaggaacccagggtgagagggacacacctcaaggagatgaactataatgaggagaggcattccaagaggagatctgcttcagcaactgagttctggggctgaggcttgatccagggtccaagacccttaggaagcatgcctcttcttgagacatctagggtgctctgaggggtcctggattcctatctgggaaagagtccatcctctcatctgtcagatgcagcccagagcagaaccatgacctgtctctggttcattgttagtgagcaggcagggttagggccagagtcccggtatcctccctcatgatggagtccctttcccaatcctccctgcccctcagctaatggaaagggaggagctcagctccacagaggcaaggccaccagggaaggctgcaggaggccagggcagcctcatgaagaaatgcttaccaggaattacaaacagcagaatggaatcctcgaaggggcaatgtgggacttcacctgttgcacaatatgagactgtttttttcctttctcctcttttcatacaacttccttttctcaccctgggcccagagagctggaatctgcttacttgacgttccagttgaggtttctccaggtttccgggtgggggcaaaagccagaacagacaaagcaggacactcgaaaggaactatggattatggagcaacttctaggcatccggcctattttcctactccttgcagtgcccacctcccccagctcactctccagatgggagtccatttccttatgtacatgttcctttaggacatgttcatgcaaacatgtctttatcccccatcccacctcaacctggaaccctccatcatgctcccattgatacaggcattttcctccaaggaggccaggagccgagcaagcagaggcagggatcaaaggagcaagatgagctgaggatggtgacatagccacagttcttcctggaggctgagaccagagaccagctggcagtcctgtactgcagtctgcattcaccctttacagatttgagggccttaaaaccctctctttcccacttatctctacctgttctcccttctaaactccttctgtcttgggttcccaactgagtctagcatacaggaaaatagaagaaaagaattgagagacaaaattgtggctgcatttttctaccttttaaatagtttcatttttagatacagtcgacattttgaatatgtgggatccaaatctgtggattcaaccgatgatggatggaaaatatttggggaagaaaaaaacacaataggccaggtttagtggctcacacctgtaatcccagcactttgggaggctaaggtgggaggaatatttgagcttaggcattctagaccagcttgggcaacataacaagaccccttctctacaaaagtaccaaaattagctgggtgaggtggcacatgcttgtagtcccagctacttgggaggctgaggcaagaggatcgcttgagcccaggaggcggaagttacaaacagctgagatgacatgactgcactccagcctgggcgctagagcaatatgctgtctcaaaaactaaaaaagaaaaaagaaaaacaaataaaaaacaatgcagtataacaatgatctacatttacatttatgaatagcatttacattgtttaggtattctaagtaatctagagattaaagtatatgggaggatgttcataggttatgggcaaatactatgctacatcagagactagagcatgtgtagattttggaagccatgagaattcctagaaccaatcccctgtggataccaagggatggctctacatgataagtgtgtaaaatatatatattcagaaggaatgagaaaatcaaaattaatttttttcagggaagatgggcttgatgggacttgatggaggatggtctgggagactctccccttctatggaaacattcccaactgggagaccagcacagctgcagggaaataatttcttcaggcagtgttagctgcttctaaatctcaggaccctatgtccctgggctcctcaaggagacatttgttatttacagtgactcctgattcatttgcttagggggtcctcttgtctttctgctagggacttggaaaaggagagagggcctagcctcccagcctacatctttctcctctgctggttgtttccttgtgatcttgtaagttaacacttaataaatcccatatatatatgggatttattaagtgttaacttacacttatatatatgtatatatatgtgttatatatataatatgtgttatataatatatacatattaaatgttaacttacacatatatgatttatttgtatatattatatatttatatatatcctaatatgtgtgtatatatatatctatatctatctatctatctatctatctatctatctatctatctatctatatatatcctattagttctgtccctctaagaggaccctgactaatccagattttggtaccaggagtggttctagagaaatggaatattaagagtggagttctttcattggttttgggttttctagagttggctgcttaatatggttagaccccaaaatgctaaggactctacgtctaatagtatggagaacactgatagtccttggtgtgaactgtttagagagttaagcaaagtaaatgcatttggcactcctgattcactgctcatgagaggcaaggagtttagtgactctatacataatacctttgaccatatgtggagaaccaaggaacataatgaagctggttggttgctcctgagttcaatagacaaagtgatgaaagaaaacgatgagctcagggattatgtctcctggcttcagaagcagatactgagcctcaaatctgctaagattgccctgagtgagacccttatcttctgtagagaaagagctgaaattgtgaaaaaacaaacacaaattcttatcatgcaagtggctgacctgcaacaaaaggtgcatgtacagactcactaggtgtctactgttaaagtgagggcattgattggaaaagaataggaccctgcaacttggaatggggaaatgtgggagcactcagatgaagctggggacactgagtttgtaaactctgatgaaccttttttgccagaaggaacagcttccccatccccagtagtagcaacatccactcccgacccgtggtgccatcagcctttccacctttgtctgaggagataaaccctgtgctgcctgaggcaacagtgatggcctcctctgaggcagttgccaggcaaaataatgttgattctcctcaggagccaccccaacacccctgtttcgtggtccactacattgatgacagtctagacctgtaactagactaaagtctggtccattacattgatgacagtctagacctgtaaatagactaaagtcccagtgggcccctggaggtgaggttgagagtgtgatccatgaggaggtgcacggcacttcaaaagaactgtttgagttctctaatttataaaaacagcaatctggagaacatgcatgggaattgatattaagggtatggaataatggtggaaggaacatagagttggatcaggctgaatttattgatttgagcccctaagtagggattctgcatttaatgttgcagcttggggagttacaaaagattctaatagtttatttgcttggatagctgaaatatggattaaaagatggcccactgtgagcaagctggaaatgcctgatctctcttggtttaatgtagaggaagggatccgaaggcttagggagattgggatggtggagtggattagtcattttagacctacttatcccagtggggagggtcccgaagatatacccttgaacaatagcttgcgaaacagatttgcaagcatggcaccagcatctttgaagagccctgtgattgctcttctctgtatgtcagatctaacggtgggaactgcagtcactcaactacaaaatttaaatacaatgggaataattggatcccaaggtagcaggggctaagtggcagcactcaaccatgaaaggcaaggtgggcataactactgtaatggacagcagaggcaaagtggcaatcagaatagtctgactcgtgtagagctctggcattggctaattaatcatggtgttcctagaagtgaaattgataggaagcctactgcattcctacttaaattatacaaacaaagaacttccaggtcaaatggacaaacgactaatttgaatcataaaaacagagaatcacggcccctcaatcaatttccaggattgagccagtttagagacccaaaaacccttgaatgaagcggaggccgggtccccttgaggaaggaccccactacattactgacaatttatgcagtgaatctttctcccacccttccccaaggagacctccagccttttaccagggtaactgtgcactggggaaggagaaatgatcatatattttggggacttctggacactggctctgatttggcgttgattccaggggacacaaaatgtcactgtgttcctccagttaaattaggggcttatggaggtcaggtaattaatggagttttagctcaggtccaacttacagtgggcccagtgggtccctggattcatcctgtggtcatttccccaatgacagaatgtgtaattggcatagatatattcaacagctggcagaacccctacattggctccctgactggtagggtgagagctattatggtgggaaaggccaaatggaagccattagagctgcctctacctagaaaaatagtaaatcaaaaacaatatcacatccctggagggactgcaattagtgtcaccatcaagacttgaaggatgcagggatggtgattgccaacacctctccattcaagcctcccatttggcctgtgtggatgacagatggaccttggagaatgacagtggattatcataagcttaaccaagttgtgactccaattgcagctggtttccaatgaaaccagatgtgatttcattgcttgagcaaattaacatgtctcctggtacctggtatgcaggtattgacttagcaaatgcctttttctccattcctgtccataaggcccaccagaagcaatttgccttcagctggcaaggtcagcaatatacctttactgtcctacctcacgggtatatcaactctccagctttgcgtcataatcttattcagagagaccttgatcactttttgcttctgaaagatatcacactggtccattacaatgacattatgatgattggatccagtgagcaaaaagtagcaaacacactggacttattggtgagacatttgcatgccagaggatgggaaataaatctgactaaaattcagggaacttctacctcagtaaaatttctagggattcagtggtatgggccctgccgagatattctttctaaagcaaaggataacttgctgcatttggcccctcctacaaccaagaaagaggtacaatgcctagtgcgcctatttggattttggagacaacacattcctcatttgggtgtgttactctggcccatttatctagtgacctgaaaggctgccagttctgagtggggtccagaacaggggaaggctctgcaataggtccaggctgctgtgcaagctgctctgccacttggaccataagacacagcaggtccagtggtgcctgaagtgtcagtggcaaatagggatgctgtttggagcctttggcaggctcccataggtgaatcacagcagaggcatctaggattttggagcaaggccctgccatctagttcagataactactctccttttgagagacagctcttagcctgttactgggctttggtggaaactgaacgtttgactatgggtcatcaagtcaccatgtgacctgaactgcctgtcatgaactgggtgttttctgacttatctagccataaagtgggtcatgcacagcagcattccatcatcaagtggaagtggtatatatgtgatcaggctcaagcaggtcctgaaggccaagtaagttacatgaggacatggctcaaatgcccagggtcttcactcctgccacctgccttctctcccccagcctgcactgatggcctcatggggagttccctatgatcagttgacagagtaacagaagactagggccaggttcacagacggttctgcataatacacaggcaccacccaaaagtggacagctgcagcactacaccctctttctaggacatccctgaagtatagcggtgaagggaaatgttcccagtgggcagaattttgaaaagtgcacctggttgtgcactttgcatgaaaggagaaatggacaaatgtgcaattatacactgattcctgggctgtagccaatggcttggctggatggtcagggacttggaagaagcatgattggaaaattggtgacaaagaaatttggggaagaagtatgtacatggacctctctgaatggtcaaaaactgtgaagatatttgtatctcatgtgagtgctcgagtgacctcagtggagggggagtttaacaatcaagtggagaggatgagccgtaatgtggacattactcagcctctttccccagccacccctgtcaccgcccaatgggcccatgaacaaagtggccatggtggcagggatggaggctacacatgggttcagcaagatagacttccactcaccaagactgacctggctatggccactgctgagtgtccaatttgccaacagaagagaccaatattgagccctcaatatgacactattcctcggggtgatcagccagccacctggtggcaggttgattatattggacctcttccatcatggaaagggcagaggtttgtcctcactggaatagacacttactcctgatatgggtttacctatcctgtatgcaatgcttctgtcaagactaccatttgtggactcatgaaattgccttatccaccagcatggaattccacacagcattgcctctgaccaaggcactcactttacagctaaagaagtgtggcagtgggctcatactcatggaattcactggtcttaccatgttctccatcatcctgaagcagctggattgatagaatggtggaatggccttttggagtcactatgacaatactttgcagggctggggcaaagttctccagaaggccatgtatgctctgaatcagcatccaatatatggtactgtttctcctatagccaggattcacaggtccaagaatcaagagtccaagaatcaatttgattactttaatgtaaatgagattataccatactctcttctctgtcacttcctattttcatgtaatttatgttagacatctgtcgatgtcagtataaatagatctagatcattttttatagttgtatagctttcattacatggatgtttcacaatttacttagctaactacctattgttggacatttggttatttccaaatttttgctatttcatataatgctgcgcttatataaaatatagttctatataattatgtttaattatgtactaccgctgtatctgacaactgacttgtatcaagaacatacaaagaactgttacaagttgccaggcagagtggctcatgtctgcaatcccagggctttgggaggccaaggtgggcggatctcttgagcccaggagttggagaccagcctgggcaacatggggagaccccgtctcgacaaaaatacaaaaattagccaggcataggggcacacatctgtagttccagctacttagaggctgaggtgggaagactgcttgagcccaggaagttgaggctgcagtgagccaagatcacaccacggcactccagccagcgcgtcaaaggccctgtctgaaaaaaaaggaagaagcgggggcggcaaataagtagagtatacgccacctcatccaaccttactggaaccagtagttgactggttaatcagtccaaccaaggaagcattaaaaactgatgcatgtgccgggcatggtggctcacgcccgcaatccccgcactttgtgagaccgaggcgggctgatcacctgaggttaggagtttgagaccagcctggccaacatggtgaaaccctgtctctactaaaaatacaaaagttagccatgcatggtagtacacgtctgtaatcccagctactcaggaggctgaggcaaaaaaaggagaagaaatgctatgtgaagcctttttataagcacattaatttcattcacgagggcagagcactcatgacctaatcaccaccttgaaagcctcacttcttaacatcatcacattaggtcttaggttataacatgaattttggaggactccagaaaaaaaaagtgaaagacaacccacagaatgggagaaaatacttgcaaattatatacaaagtaggctcactttatttgtggaaaatatgtagccagacgcagtggctcatgcctgtaatcccagaactttggaaagctgaggtgggaggatcacttgagcccaggagctcaagactaaccggggcaacatagggataccctatctctacaataaataaataaaattacccagatgtggtgacatgtgcctgtggtcccagctacttgggaggttgaggtgggagaatcacgtgagcccaggaggttgaggctgcagtgagccaagataacattaatgtatcccagcctgggcgatagaccgagaccttatctcaaaaaaaaaatatatatatatgtatatatttatttatctacctatatattcatatatagatatagattaatatagatatataaacatatatttatagatatatagatacataaatatatagctatatataaatatatatttataaatatatagatatatatgtaacaaaatatgttccaagacctccagtgtatacctgaaactgcagatagtaccaaactctatatgtactatgtttttttcctatacatacatacatacctatgatgaagtttaatttataaattaggcactgtaatagaataacaacaataactaataataaaagagaacaattagaatatactttttgtttttgagatggagtcttgctctgtcacccaggctggagtgccatggcgccatctcagctcactgcaacttccacctcccaggttcaagcgattctcctgcctcagcctcccgagtagctgggcctacaggcacctgccaccacgcccggctaatttttgtatctttagtagaggcagggtttcaccatattggccaggctggtctccaattcctgaccttgtgatccacccacctcggcctcccaaagtgctgggattacaggtgtgagccactgtgcccggctagaatatactttaacataagttacatgaatagttttctctctctcaaaatactgtaatatttgggattgcagctgcccgcaggtaactgaaactgcagagagcatacgggagactacagtatctgacaatggacttggatctagaatacataaagaactcttacaacttgataataaaaaggatataacccaattttaaaatggacaaaagatctgaacagatatttctccaaagaagacatacaaatggccaataagggccaggtggtggcttatgcctataatcccaacactttgggaggccaaggcaggtggatcacttgaggccaggagttcaagaccagtctggccaacatggcgaaaacccatctctactaaaaatataaaaatcagccaggcgttgtggcgcatgcctgtagtcccaggtactcaggcagatgaggcacaagaatcactcgaacccgggaggcagaggttgcaatgagctaagattgcaccactgcactccagcctgggcaacagagcaaaaccccacctaaaaataaataaataaataaaaataaaagaaagaaaataaatggccaataagcacaagaaaatacactcaatttctgtcttagtctgtttgtgctgctataacaaaatacctgagactaagtaatttataagtaaaaaaatttattcctcacagttccggaggctgggaaatccaaaatcaaggtggtagcacatttggcatttggtgagggcctgttccattgttcccgttctcgcagtggcatcttcacatggcaggagaagaaaggaaaaaagaagaagaaatgttatgtgaagcctttttataaggggattaatttcattcacgagggcagagccctcatgacctaatcaccaccttgaaggcctcacttcttaacatcgtcacattaggtcttaggttataacatgaattttggaggactccaacattcaaaccatagaaacatcattagccatcagggaagtgcaaatccaaaccatgttaagataccacttcacactcacaagaatggctataataaacagacacataataacaagtgttggagaaaatgtggaaaaattgaaacactcatatgttgctggagggaatgtaaaatgctttgcaatgaagttggaactgctttggaaatagtctggcagttcctccaaagcttaaacatagagttatcatatgacctggcaatgccaggcttcatcatattcccaaggggaaggaaaacatatgtccacacaaaaacttatacatgaatgttcatagcagcattattcataatagtcaaaaagtagagacagctgggtgtggtggctcccaacactttgggaggccaaggcgggaggattgcttgagctcaggagctcgagaccagcctggccaacagagtgaaatccgatctctactgaaaatacaaaaatcagcgggacatggtatacgtgcctgtaatcccagctacttgggaggctgaggcaggtgaatggcttgaatccaggaggcggaggccgcagtgagccaagatcacaccaccgtactccagcctgagtgacagactgagactccatctcaaaaaaaaaaaaaaaaagtgataaacagataaatgaaatgtgttatattcctacaacagaatattattgagccataaaaaaaaggaaataagtactgacacatgctataacatgaatgaaccttgaaaacattaggttacttgaaaaaagccagtcacaaaagatcacaaattgtatggttccatttatatgaaatgtccaaataggcaaatcctatcctaaaagaaagtaaattagtggttgcctaggactgagggatggaggaaatggggagtgactgctcataggtatggtatttttttttgagagaaatgaaaatattctaaaattgattgtggtggccaggcacaggggctcacgcctgtaatcccagcactttgagaggccgaggcgggcggatcacctgaggtcgggagttcgagactagcctgaccaacatggagaaaccccgtctctactaaaaatacaaaattagccgggcatggtggtgcatacctgtaatcccagctactcgggaggctgaggcaggagaatcgcttgaaccagggaggtggaagttgcagtgagctgagatcgtgccactgcactccagtctggcgagagagtgaggctccatctcataaaaaaaaaaaaaaaaaagaaagaaaaaagaaaaaaaagaatgtttcaggcaaagggaagagaagtgcaatggtgctatttcaggcagaagcttgtcaggtttgctgtggtgtggctagtgtggaaggactcagtgggaaggaaaagaaatgagggcacagtagtgggcagggccaagataaaataaagccatatgcatactgctacattttttccttgctaacatatttcattgaatgtagacaaaacttattataaagacataacttttgatgtttgtaaggtcatctgttatttgcactccttttttttttgagatagggtctcactctgtcacccaggctggagtgcagtgttgccaccacagctcacagcagcctcgacctcctgggctcaagcactcctcccaccttagcctcctgagtatctgggactacaggcacatgccaccgtgccccactaattttttattttttgtaaagacagggtttctccatgttacccaggctggtctcaaactcttgagctcaaacaatctacccaccttggtctcccaaagagctaagattacaggcgtgagccactgtgcctggcttgttatttgcatttgtgattttaaaattccatgttttttatcataagattgtcaggtgctttctggacaggaaatgccttaatttatgactcaaaatacaaacaagtgtaggtgatcaaatgcatatctatgtcttcaatggaaatatatatacatacaagtcattaacgaagacaaatgagaacatgaaattcatgacctattttcctttccatcacctagccccctaaaggagagatctttttcattcagagccctgggttttgttttgtttcatgatttgctttttttttttttaaataagagtttatttatttatttatttgagacaaggtttcactcccatcagccaggctggagtgcaatggcgtgaactcagttcactgcaacttctgcctcctggactcaagtgactctcttgcctcagcctcctgagtagctgggactacaggcacgtgccgctgcatccagctaattttttgtagagacagggtttcaccatgttggccaggctggtcttgaactcctgagttcaagcgatccgtctgcctctgagtctcaaagtgctagggttacaggaatgagccgccgcgtggccaaaagagtttattttttaaagaaaattgacttctttgaaaacgtagaaatgaggccgggcgcagtggctcacacctgtaattccagcactttgtgaggccgaggcaggtagatcgcttgaactgaagagtttgagaccaatctggccaacatggtgaaaccccatctctactaaaaatacaaacattagccgggtgtggtggcaggtgcctgtaatcccagctactcgggaggctgaggcaggagaatcgcttgaacccgggaggcggaggttgcagtgagccaagattgcgccattgcactccagcctgggcaacaagagcaaaactccatctcaaaaagaaaagaaaaagtagaaatgaggaagcggccagcctgtgtggggatctaatcaaacaaatcttcccctgatgagggtagcacttaagttgaaaaaaatttgcctatataataaatattgcaatactttatttatttatttatttatttttcgagatgagggtctcgctgtgttgcccaggctagtcttgaactcttgggctcaagggcttctcctgcctcagcctccccagtggctgggctaataggcacacaccaccatgcccagctctacatactgattttttttttttgagatggagtcttcgctctgtcgcccaggctggagtgcagtggcgcgatctccgctcactgcaagctccgcctcccgcgttcacgccattctcctgcctcagcctcccgagtagctgggactacaggcgcctgccactgcgcccactaattttttgtatttttagtagagacggggtttcaccgtgttaaccaggatggtctcgctctgctgacctcgtgatccgcccgcctcgacctcccaaggtgctgggattacaggcgtgagccaccgcgcccggcccatactgattttgaaatttaaaaaatctacattctatattcgcatcatagcttctccctaataaaatctttgtgagtgtttatgggacttattccccgaaaaatctgcaagcagcctggtagctttatatacacaggaaagccaaaggacaaactaggaattacgtcagagatggggaaagactaaggatcttacccaaatcagttgagaatcagccttaagtataaatgggccaggtgttggtggctcacacctgtaatcctagcactttgggaggccaaggcgggcagatcacttgaggtcaggagttcgagaccaccctggccaacatggtgaaaccccgtctctactaaaaataccaaaattagccaggcgtggtggcacgtgcctgtggtcccagctacttgggaggctgaggcaggagaatcgcttgaacctgggaggcagaggttgcagtgagctgagatcacgccactgcactccagcctgggtgacagagtaagactccgtctcaaagaaaaaaaaaaaaaaagtataaatgaagcacaattaacattttttaattttatagagcaaaagttcataaaaataaatattctaattaactctcctacatcttataaacactattaccaaacccatttaagattgaagataaattatatcatggcatgggtaaagattttcaataaggagttgctaggatgaaagtcaaaattctccagcataaattcactgacagggatttctgtttaatcttttcaaaattctaatacccaatttgtttcctctagagaataactcgtgtagaatcataacctctttggtggaccttgatttttccatctgtaaaagtatagaactagttttgacttaacagtcaacaaatgcctaccctctccatatctagctgattagagcgccctcgtgcgcatttgctgtaatgttttagaaatctgaaaaagacaatattaatctcagcagtaatacaataaataatgtcttcatttgcacatttatagcaaatgctataaatatatagctccaagtattactcagtaaaagctaaaggcaaatgctgtagtaggttaatcttactgtcgttcactatcaaacctttcttatgccaattttatcctaaaacagtgaagttattgttttggtttcaattttaatttaatgacttaaaggattttttcccttaaaacttctaagtatttcattataatattatttcatcattaggcttaaaggaaaatatgtggtcaattgagttgttatttattatacatgatagcttgacatcatctttttagggatggaaaacagctccagggaccaagtctaactcagttttttgatataagaatttacctgtcggccgggtgcaatggctcacacctgtaatcccagcactttgggaggccgaggcgggcggatataggtcagcagatcaagaccaggagttcaagaccagcctggccaagatggtgaaaccccatctgtactaaaactacaaaaattagccaggcgtgatggcaggcacctgtaatcccacctacttgggaggctgaggcaggagaatcacttgaacccggttcaagtgagccggctgcagtgagccaagatcacgccactgcactccagcctgggcaataagagcaagactccatctcaaaaaaaaaaaaaaaaaaaaaaagaatgtactagtttgaatcataacaatttcttcctactcaaagagactacattggaggaagccaaaacagaagcttatttatttatatactttatttatttatttttgagacagagtcttgctctgtcacccaggctggagtacagtggtgtgatcttggctcactgcaacatctgcctcccgggttcaagcgattctcctgcctcagcctccctagtagctgggattacaggtgtgtgccaccacggccagctaatttttgtatttttagtagagacgggttttcaccatgttggccaggctggtctcaaactcctgacctcaggtgatccacctgcctcagcctcccaaagtgctgggattacaggcatgagccaccaagcccagcctagagaagcttattttttaaaagaaaatacacaaaaaaatcaaaatctcataagtccagttgtaattttttttttggcttttaaaaactgttaatgccctcaaatattctcctatccaatcactgtattttaaatggcattcctccaacaaatatttgttgagcccccactatgtgccaggattgaaatgtcaaattgaaggaggcaatagctactgaagtaaagcaaaaaaagtactggttatttttccttctataaaatgacctagtaataaccgctttacccaggagagttgctgtaaagatctaataacatgacacatataaccacacccctaaagaatgaggtgttaccgcatgttctcactcataggtgggaattgaacaatgagaacacatggacacaggaaggggaacatcacactctggggactgttgcggggtgtggggaggggggagggatagcattaggagatatacctaatgctaaatgacgagttaatgggtgcagcacaccagcatggcacatgtatacatatgtaactaacctgcacattgtgcacatgtaccctacaacttaaagtgtaataataataaaataataaaattaaaaaaagaaattttgcttaaataaatattataataaaaaaaacgaatgaggtgttattaaaatgtttgcaagagaaaccctagtaattccaagcacatattttaggaatggtttcttgtgtagaaaatcctggaatgtgaggctctgctgatttttttaatgcatattctcttcttatgtatgcggaatttttttttttttttgagatagagccttgctctgttgcccaggctggaatgcactggcacgatcttggctcactgcaactgccacctcctggtttcaagtgattctcctgcctcagcctcccgagtagatggaattacaggcgtgtgccaccgcacttggctaatatttgtatttttagtagagatggggtttcaccatattggccaggctgttctagaactcctgaccttgtgatccacccacttcagcctcccaaagtgctgggattacaggcatgagccactgtacctggcctatttttgtttttactaatgtttcaagagacccactttatgtacagaattctggctacaacctaacaaatgagttgctctgttcatcagttatagccaatttaagtaattatgaaaagctcaacaatactttaactggcaatgaaagcgtcaatatctcacatttaccaccacaacttaggatttcttggtagctaaataaaatgcttctattttgtggggggaaactgtcacataagttgaaattctgcaatgttcaattgatgaaaaggtctctatgttaaatcaaaggtataaattccacatcagtagtacatgaaagagaaaaaaaaagccaaaattaaagtgatccatgcccacttccctgagtgaacctaagattttactaacagagatgccgtaactttgatcatgcacacatcaaacttgaatttaaaaacatgcatgcactcactcatcttttatctcttatgtaattaatactgtaagattatattttgcctacgtgctctatattactaatttataggattattactattcagtgttgtttacttgaaaccatactgtactatacacaacttttgcattccatgctaactttatttttttaactaatttttttttatacagagtctcactcactctattggccaggctggagtgcagtggcacgatcttggctcctgcaacctctgcctctcgggttcaagtcattctcctgcctcagcctcccaagtagttggtaccacaggtacatgccaccacacccggctaatttttgtatttttggtagagatggggtttcaccatgtgggccaggctggtctcgaactcctgacctcaaggttataggcgtgagccacgatgtcccaactccatgctaactttagagcttatttcccatcccataagatacaacactacttgtgttatatagtgagcagtgtggggaagaaaagcatagaattaagttagtgacaaatccagtgaactcaaaaagagggaaaaaaccactcccaaacaattgttttccccatattctattctccctagaggtagtccatacaggaacgacaaaagaaaaaaaaggatacaaaatgagaaagatgttcatgtgacatataagtacagtaataaaatcaacaagcatatatggtatttaagcaaaatagtatgtatgcattgatggtcatctgatataaatccatcatttctgttggccaacatctaaaaccttcacttttctgaggagacaagctataaatctatacggatatttctacaatgagaattcattattacatatgaaccaatataatttgatgtcaaatattcacaattaggtttaaaaaatcccctacttggccgggcgcagtggctcatgcctgtaatcccagcactttgggaggccaaggcgggtggatcatgaggtcaagaaaccaagaccatcctggccaacatggtgaagccctgtctctactaaaaatacaaaaattaactgggcgtggtggcaggcgcctgtagtcccagctactcaggaggctgaggcaggacaatcacttgaacccaggaggcagaggttgcagtgagctgagatcgcgccactgcaccccagcctgacgacagagtgagactcagtctcaaaaaaaaaaaaaaatcccctacttatgttaagagtaccaaaaatagggccaggaatgatggctcatgcctataattttggcactttgggaagccgaggtgggaagatagcttgagtccaggagtaaaatagtgagactctgtctctacaaaaaaataaaaaattagctggatggggcacacacctgtagtccaggtactcacgaggctgaaatgggtggatcacttgagcctgggaggtcaaggctgtagtgaactgtgatcacaccactacaccctacacccagcctgggctacaaggtgagaccctgtctcaaaaaaaaaaaaaaaaaaggtaccaaaaatctatagctgtttcaggaataaaatacatgtagttagtgaggtttttctctcccactgctatgacttaatttttggttgagatgctaagccaaacatcattttaagtctgtggcccaaccaaaaaagggaatcatactctccaaagaattgtacattcccactctaattgctaaaataaaatgttggattatgaaaatcaattttataggtatcaataagttataagagcatggcttatttaaaaaaaaaagtgggccaggttacctacatgagctgcaaagcaagcaaactgaattttcttatcgaagagcccatcctcatacttaaaatttcccatgactacatggaaattctttcacttaccaaaaagacctgattggcactttcactgagagttgcgtcatctgggctgtcgacaggtgtctgacgtgtaaacttggaatcaaactgacttacatcctcttcagattgctttatacaaacaaaataatttagaaaataatgaatagtccatatgacatcaattaaatgcactgtaagctctgggagctcttttcgcaggggttaactataataaagtattagaatagtcttagcaggcacttttctaatagtggagaaatgcaagtggaagaaaaaaatgcaagtggaaagtactgagtcaaattacatcttcaaatcttaaacatgcactaaaaaagattttagtatactgttattcctattaaaaatgtgaatatattgactgggcatgatggctcaggcctgtaatcccagcactttgggaggctgaggcaggcagatcctgaggtcaggagttcaagaccagcctggccaataaagcgaaaccccgtctctactaaaactacaaaacatcagccgggcgtggtggcgggcgcctgtaatcctagctactcgggaggctgaggcaggagaattgcttgaacctgggaggcagaggttgccgcaagcagagatcgtgccactgcacaccagcccaggtgacagtgcgagagtctgtctcaattaaaaaaaaaaaaagaaaagaatatatcgagctcaaaacaagctggaaaaaatgtgaatatcaatttcccctctcacaaagcttcagtgtgcctagtccactggctaaatccctgtttagagataattaattcagttggctactgcaggtttgtaataaacctgaaaaactactgaagcagagttaaaacatgaataatactggtaagatgctccagttaaagtttcttctcacagctcatttcattccttcagaaatctaaaggagcaaaaataattttctattccgcatgggttataagttatatttccttgtgaaagtatagttatcacttcagttctaaccatgagatttatttatttaattccttctctctttcccaaaatatctggttaaactcttgggccaaatgtaagaagtaaataataatttagaatatctgacttaatactaaaagatgatgaccacattgaccttataattctcttagagcccagactgtgaacctgcactccctggaggaatggctgattccaagtgtggggaaaatgtacaagataagcatagaacaccagtttccttattttgctctctcgtacaacaccagacaatgtgctcatgtcaaaaggactcagaacccaacatgaagatgcacccagcattcactgcacccagcattcaacgaagggaaaaaacgagcaccaataaaaataactgctaggtgcggtggctcacgcctatcatcccaacactttgggaggcagaggcaggtggattgcttttgagctcaggatttgaagaccagcctggtgaacacggcaaaaccccgtctctaccagaaacacaaaaattagctgggcatggtggtgtacctgtggtcccagctactcaagagggtgaggtgggaggattgctggaggtcgggatgtcaagcctgcagtgggcagcgattataccactgcactacagcttgggtgacagagttaagaccctgcctgaaaacaataaatgaataaataaaaataaaataaaaataactgcgatgaaaggaaacacaaatatgttaaaacgtgtaagttcataatatactaaaaaagaaaaaaacacacacacaaagttcattggtcaattttggaagatgctaggaaactaattcattattttgaaaactaggaaagaatcaaacatacatcctgccttttctgtatgaactgtaccttgggtaactaactgatcaaagagtttctctttatgaaagaattccagctaacaaagaaagaagaaataacagttagaataaaaccatttcacaaacacctgatgaaactacaaaagtaggccagagtttctcaacctcagggctactgacattttaggcctattaatactttgcgttagggggctgtgctgtgctgactcttacccctgaaggtacctatagcattccctctcccaagctgtgacagtgtgtctccagacattgccaaattaccctggtagtgaaatgctgacacaggcagtgaccactaacatcactaaaaaaacacacatacgcacacacaagtacacattatgcctcctgatcaaagcatatgcgatactgagagtgtaatctgaatcagatcaaccacctaaatttaactaccagtttttggaaatttggggaacagatgaacatggtcaatgacactctggggataatatcagcaaaatcaaaatttgagaattctacaggacaaatgaccccgtttcttcagtaaatcacgaggggaatctataaaggaaaagagacctaagagacatagtaaccaaactacatacagaccttgattaacaggaggaaaaaaaagaatggaacaacaacaacaaaaaaattaggtggggcaacacagggagacctcatctctagaaaaattcaaaaaattggatgtggtgatgcacccctgtggtcccagctatatgggaggatcccttgagcctgggaagctgaggctgccatgagccactatcatgccactgcactccagcctgggcaacagagaaagaccctatctcaaaaaaaaaagagaaaaaaaaaaaactggggaaactgtcaacttcttaggtgtgatgatgggatgacagttatgtttaaagaagatgatctaattatttttaagctgggcagtaggtgtatgacagttctcctccttacaattgtttgttgttttttaaagtgggtcacattatggggcatgaccaaaaaataatcaccatcatcatcctcctccttctccacctacagcccaaggaatggaaaaagaaactgtgttttctcagattctgaggtggcagaaagacaataacacactaactcatttactcataaacatattgttatggattgaatcgtgtcccttactcaccccccagaaaatttcgtatgttgaaactctaacctctagttcctcagaatgtgaccttatttggaaagggttattgcagatgtaattagtgaagatgaggtcctactggagtagagaggaaccctaatccaatatgcctggtatccttataaaaaggggaaatttggccacagatacgcacacaggtagaacaccatgtgaacatgaaggcagagatccaggtgatgcacctacaagccaaagtatgccaaagatgaccagcaaaccaccagaagccaggggagaggcatggaacataaggtttctcacagttgtcgaagaaaccaactctaacaacgtgatctagaacttctagtctccagatctatgagataataaatttctgttgtctaagccacccagtttgtggtactttgttgcagcaagcctagcaaactaatgcacacatattctatattttgaagaaaaaattcccagagaatcatatttaaaatggttaaattaagcaaaataaaacaaaccaaaaaaagaaaagtcccaactacctgaaatatttaattgtcttaggaaactgacttaaaaatatctaatacaggccgggcacggtggctcacgcctgtaatcccagaactttgggaggccgaggtgggtggatcacaaggtcaggagttcaagaccagcctggccaagatgatgaaatcctgtgtctactaaaaatacaaaaatttgctgggcatggtggcaggtgtctgtaatcccagctactcaggaggcagaggcagagatttgcttgaacccaggaggtggaggctgcagtgatccgagatcacaccactgcactccagcctgggggacagatcaagactccatctcaaaaataaaaaaataaaaataaagaagaaaaacgctatggaatttgactagaattagggctaacaatatgaagcactttgggaagccaaggcaggtggatcaccatgtcggccaggagtttgagaccagcctggccaacatggtgaaacctcatctttactaaaaatacaagaattagccaggtatggtggtgagcacctgtactcccagttactccagaggctgaggcacgagaatcactggaacccgggaagcagaggttgcagtgagctgaggcagcctggtgtccaagctgtggtgagccatgaccataccactgcactcaagtctgggcaacagaggaagtccctgtctcaaaaaaaaaaaaaaaaaaaaaaaagggccaggtgcagtggctcacacctgtaatcccagcattttaggaggctgaggcgggcagatcatgaggtcaggagttgaagaccagcctggccaacatagtgaaaccccatccctactaaaaatacaaaaatcagccgagtgtggtggcatgtacctgtaatcccagctactcaggaggttgaggcagaagaattgcttgaacctgggaggcggaggttgcagtgagccaagaccacatcattgcactccagcctgggcaacagagtgaacctccatctcaaaaaaaaaaaaaaaaaaaatttaaaaagggagtatagggccagccgcggtggctcacgcctgtaatcctagcactttgggaggctgaggtggctggatcatggggtcaagagatcaagaccatcctggccaacatggtgagaccccatctctaataaaaatacaaaaaattagctggacacagtggcgaatgactgtagtcccagctaatctggaggctgagacaggaggatcgcctgaacctcggaggtggaagttgcagtgagctgagaccataccactgcactccggcctggtgacaaagcgagacttcgtctcaaaaaaaaaaaaaaaaaaaaagagtttaaaaaattctttacagaagaatgacaatataggaaaaatacagaaaaagtagaaaagtctccattttctaatcactatagtaatatttgatttgggcaagaagccatccagatgaaaccattaagtaaagattattatgggacagaatattcacactgtttctatcatgccatagatcacttgttaattacaaaaggaaaaagaggctgagaatggagtctcacgtctgtaatcccaacactttgggaggccaaggagggcggatcaccttaggtaaggagtttgagaccagactggccaacatggcaaaaccccatctctactataattacaaaacttaggcaggcatggtagcaggcacctgtaatcccagctacttggggggctgaggcacgagaatcgcttgaacccaggaggtggaggttgcagtcagccaagattgcaccactgcaccccagcctgggtgacagagtgagactccttctcaaaaaaaaaaaaaaatgcccttattcttaggagatgtatagaagaaattaggggtgaagtgctatgaaatctgcagttaactctcaaattgtacagaaagaaaatttattaatgttaaaaaatgtcaatattcatagatacacatatatgtgggggcaggtagaaagggagggacacagagacaaagaaaatatggcaaaatggtaacacctggtgatcactgaactattcttgcaactctgaaaagtttaaaaaatttcaaaggtatattgtttttgaactgctcgggaggtttaaatttttgaatttttaaaataagcaatcaattgtgaggaagtctgagaagccacagacttaagagataagatgaaaaataaggaaagtagaatcacagtaataagaggaacagagtttcaaaatgctgtggtcagtcagtagcttcaatgcaaaagaaagttaaattaaggaccaactcagtaaagacaactggattcagcaactgggaagtcagtgatgacctagggtacaggagctgcattgaaatagtagagttgggccacgcgtggcccacatctataatccagcagtttgggaggccgaggtaggtggacctcttgaggccaggaattcaagaccagcctagccaacatggtgaaaccccatctctactaaaaatacaaaaattaacccgagacagtggcgcacccctgtaaccccagctactcaggggcctgaggcatgagaactgcttgaacctggaaggcagaggctgcagtgagctgagatagggccactgcacttcagcctgagtgacaggggaagactctgtctaaaaaacaaaaaacaggcctggcgtggtggctcatgcctgtaatcccagcactttgggaggccgaggcaggcggatcacgaggtcaggagatcgagaccatcctggctaacacggtgaaaccccatctctactaaaaatacaaaaaattagctgggcgtggtggcaggcacctgtggtcccagctcctccggaggctgaggcaggagaatgacatgaacccgggaggtggaggttgcagtgagctgagattacgccactgcactccagcctgcgtgacaaagccagactccctctcaaaaaaaaaaaaaaaaagacgtaaactgggtatgtgcctttagaggtggtgcacatttttagcattataaatgaatataaatgagtggcaactgttactttggtccacagatttttggtatcttaactagtttttggtctcttccactaaaggcattgcctgttgaaccttgttaggaatgtaagtactgaaggcaaactgcctgggtttgaattttgttctgtcccttgcaccctgcctggtttcaaatcctagctctgcttattacgttcttttaaggggatgacctttgagcaaatgtcttagcttctgttttccccagtaaatggacacaatagttgctactttgtgaaagattcatgtaattgaccagcgtttaccaagtagcatcagtgtttagtttcagtcattggtgattctgcagttggactgtgagggggtattggggtggggggtggtgtgtgtgtagcacttaattgcaggcaggaaggaaaagatacttttgataaccgacaggcagcttttctctgcttttgtgtcaaaagggaggaagggagtttggagagggaaatgaattctctgtaacactaagctctcttcctcaaaaccagaggtagatagaatgtgtaataatttacagaatttctagacttcaacgatctgattttttaaatttatttttattttttcaggttgagactgagctaaagttaatctgtggcgacgttctggatgtactggacaaacacctcattccagcagctacaactggcaagtccaaggttttctatcatgaaatgtaggttctatactaacaattaacaagtgtacttcaataaatttaaacattctcaggaatagttgactttgtttctttttttcttagacatttcatattattttccttattaaatataaccaaaaatcccacagaaattaactgaggagcctctaaatatcaacaaagttatcacttgatagactagaattaaacaagcaagtggttccaagaaatggcacgagtgtattaatcataaaataaaatttctacatgaaacattcagccattctagaccatttctgtctgtgcagactcatcttttcctgttctttgcaaagcccagctagagcaagcaagttcttcccaataggtttttcccatctctggttgcttggctggctgggcttcctctacaaacccccttcctttcccctaagcagggcccggtgtccccatcccgcggagttgagctcatgagggcatctgaccaggagtagctattcctggtgctattgtcattgtcctgtttcatgtgtgaacatggctggctctacagagatttggcgggtagcaaggaggtttctttttgaatcttcttttggaagtcagacttgatgaggatcttatgcccactttttcctagctctgtggtgtcaggcaaagtctgtttctgcaaatgggggttaagaattcctacctcacagcagtcttttgataaataaataagatcttaagtgtaaattattccactagaaattgcacagtcactttggtcttcatcctggaggtccactgacaagcctcatgcaaacctgtggccctgttcataaagtgttttgatccatactttcaaatggcctcaggaagaccttttataaagtaaaaatgttaggcagccacatgatatccattgacccagtgaggctgttttactggatataagaggtttgacccggcattttggggggccgagacaggcagatcacttgaggccaggagctggagacctgcctggccaacatggagaaaccccatctctattaaaaataccaaaaaaattagctgggcatggtggcacatgcctgtaatcccagctacttgggagactgaggcacaagaatcgcttgaacccgggagtcagaggttgcagtgagccaagccgagatggcgccactgcactccagcctgggcagcagagtgagactctgtctcaggggaaaaaaaagggtgaggggagggtttgaaaaaatagtagcatgtagttatgtttctacaatatttgatatatataaggatttaccaacctcttgcattagctgctatcccctacagcagttgctgtaggaaaaaaacatcaagttctgagctcctactgtttgccaggcatattctgagatgatcacgttgaaatctcagagttaccctgcagagtagtcagggtatcactgcctgacagatgaagaagctgaggcttccagcagataaatgacttaccccaggccacatagaaaatgagtgggagagcccaggtctgtctgtgaggtataatgaaattagcataaaccctccacattggcgccactcgcataaattaacatatattctctcacagaaagtattttattgggcataacagtttgtatcatttaccgtttaacattagccgtggatcttcccacatcacatgactatgcctcattctttttggataatatgattactattgaatggatttactatcattcacttaatcaatactccttttgatggccattttaattgtctattttttccttttgcacagattggtgtaataaacgtgattttatagtaatatttttgtctgcctgtgaaaatgtttgctggacaataaattcctaggagtcaaataaggtcaaagattataaatacagtatttattttcataaatattaccaagtcagccacaaatgtttaaattactaatggtttcagattattgtatttaatgagtaaacacttttatagggtttacttttatgaacacttttatttgccagatatcattctaagtcctttacaaaattaacttttttaatttgtaatataaccctgagatgtatattaggattatccccattctacagataagaacactgagaagttaattaacttgccacatatctaggaagtggcaaggctagttgcacagccaggcagtctggctcctgagtccacattttagacaacactatacctcctggttcttttgaggcattactgctggaactatcctaatactcataaataaacatttcttttggggagggccaaataaaattttaaacagaaaagttttcaccaactgtcaagctcataaagttgtacgttatacacttttttcatgatgcccacagataatttattaatgatatcatctattttaaaagacgtatgtaaaacccaacccttaagaaaggattcctatcactgttcccacaggcaccctcctcagtcttatacctttccattccaccccccaaaacaaatcattcagcatatttatttcatactgtaatataggaagtagcttctttttagattttcttagattattaacattgatcatacaaacatggaatagaaattccttatgttttatctggatttaaggtgctacataatggaatctatttctatcaagccatacacattggagataatgaaatcacttgtgttctagcctaaacgttatgggaatttcagaactgcaacataacagataatccttggacgaaaactaaatctctcctctggtcaggcatctatgtgcatcagtgaagagaagacggggactgtggaagggaaaacagtgagtcaggaaggactgtggccacatctgttccccggaccctcaagtagttaaatcctgacctcctctaccccagactgtcctggggaatggccaacactggcttttcacaactgtgtgttaccagaaatgcaacagaaacccagctgaatccccagggtttcccttctgcccttctcaatggaaagatctgtcccaggaccatttattccaacattttcaattatgagaaatctgggaagataaagttattttcacatttctcaagaaatacatacttattcatactcatgacaggaaagtcagaatctacagaaaaccaagaagatttttaaaaatccatgataccaccatcaaaagagccacacttagtatgttggtccacaggtttcctagcacccttttctgttggtgtatgcacaaaatacacaatcacattctgtctacattttacaatttgccattttttgattaacactatatattgaccaatttttaagacctgcaacatatgtcgacaacattatttcagaataatatatttataaataaacgcacacacaaactgtctgtcttatatacaacacgtcttactttctaattctccactctggaagatttaggttttcctaactttttaatatactcaccaggaatcagtaaactttttttataaaaggccaaagggtagatattttaaactctgcaggccataggtttctgttgcaacactcaactctgctgttgcagggaaagaagccatacacaatttgtaaatgaatgggcatgactgtgttctgataaactttacaaaaacaggtggtggactagatgcagcctgctcctctggacatggcttaccagcccctgacatataccactacagaggatgctgttagaatgaaatctctttacacatctctgatcatctccttaggactaattgctagacatgacatcatggtagctgtgggtcaaagggcatgcacgctctgggatgtacattgccagattgctcatgatcagcctttctcatgtcaaaatgttttgtgaccaccagaaggctggttctgcttttattatccattgactgaggagtagaaatgacatggcatgtatgcaggatatttaaccatcgtatagataatccttgtgcacaagtgcattctatattctttcccaataggtctacatctgccagagttgaaataaaataaaacaaaacaaacctatttagcaccttctgtgtagcaggtccattcatgtatgttgttgtatttcattctcagaattcttatgacctaggcattttaaacatttttttaaaaatattgagttgacaaggattgtgtatatttaatgcatacaatgtgatgatttcatatatgtatatattgtgtactaattatcacaatcaaatttattacatccattaccacctatgctgtacattaaatctccagaatttgttcatcttataactgaaagtttacaccctttgattaatagcttcccattttccccacctccagcccttggcaaccaccattctactatctgtttttatgagtttgactctcttagatcccacatataagtgagatcatacaaaacttgtctttcggtgtctggcttatttcacttagcgtaatgtcctccaggtttatccaggacaggagtttcttcttttgaatggctaatagtccattgtttatatgtattttatttatccattcatctgttgctggacacttaggctgtttccatatcttgggtattgtgaatagtgttgtaataaacatggggcgcagatctctcttcaaggttctaacctgattgctgaatcgtatggtagttctgcttctaattttttgaggaacctccatactgttttctgtaaaggttataccactttacattccaaccaacagtgtacaagggttctctttcctctatgctttcgccaacacttgttatctcttgtcgtttttttataagagccatcctatcctatgaggcaatatctcactgtggttttgatttgcatttctctgatgattagtggtgttgagcaccttttcatatgctggctggccatttgtatatcttccttggggaaaaaagtccattggggtcctttgcctatttttaattgcgttattcatgtatttattaatttttgctattgaattgtgtgaattccttatattttttcaaataaccccttatcaaatatatgggtcgcaaatattttcttccatcccgtaggttgccttttcattttgtcatggtttcctttgctgtgtaaaaccttttaagattgatgtagtcccatttatttattttcacttttgttgcctgtgctttggtgttacatcaaaaaaaatattgccaattatgaccaatgtcgaggagatttttccctatgtttacttccaggatttacatggtttcagatattacatttaaatctttaatccactttgagctaattttctgtatatgatgtaaaacaagtgtgcaatttcattctttttcatgcactttccccaacaccattcattgaagagagtttcctttctacattgtgcctttttttttttttacagtacagtgaaagcaagtctattaagaaagtaaaggaataaaagaatctacattgtatatccttgatggccttgtcaaagatctgttgaccatatatgcacggggttatttctgggtgagcttggcattttttttttttttttttttttttgagacagagtctcgctctgtcgcccaggccagactgcggactgcagtggcgcaatctcggctcactgcaagctccgcttcccgggttcacgccattctcctgcctcagcctcccgagtagctgggaccacaggcgcccgccaccgcgcccggctaattttttgtatttttagtagagacggggtttcaccttgttagccaggatggtctcgatctcctgacctcatgatccacccgcctcggcctcccaaagtgctgggattacaggcgtgagccaccgcgcccggccgagcttggcatttttatctacctcattctaccgatgaggaggccgagtctcagagagttcacagacctgcctaaggtcactcagctagaggtgatacaaccagggtttgaactgagatctgccaagcttctgagtttattctttttcccccacaccaaggatcctcaattctgccttactgacatcaggatccggtcaattctttgtgatgggggctgtcctgcacctggcaggatgtttagcagcttctctggcctccacccactggatgccaggggaatgcagaagaggcttgttcattctcccatttaatcctcaggacaatatctgacataaatgttacgtcttttattttataaatgaagaaaatgagactcagaaaggtttaagtgagttacttaagaacacacagacagcaaaggtagaactggaaaccgaacacaggtgtccacatgggacaacaaaaaagttcacgttccatcttcttttgagtctctcatttcaataattaccattgtgtggatatgagctgaagtacaggaaacctggggctgaactctcctcccatcaggcctaggagccccagaccagaaccccagcccaaggtctcccagtcaggcccgctggtgtgagctggcatctacactagcatggtctcccaaagctgcagggatgccagtctcgccgctgatgaagaaaatgaagggcatttccttctcatgcaggctgtcgggatttaacacagattccttttcttgctctcttctcccatagcacaaaactgggtggtccatccccctcccagtgtcccaaggctttgttgcgtgttctctttaatttctcccactcttgcggtgtaccctaccctcatctccctggcaacctttctgctgtatcctctcgacacctggatcacaagaacacttgtgagaccccttaacaagttacatcccaaattatcattcccctttgtcctcagccagtgctcaggtccaacttgctctcctggggtgactttctttcctgcccaatatggtttcatcatctgtaaattggggataattaaagtcttgatcctgatatttgactctcaaagcagaagtagcaagctcagccaagtcacttcaacaagaggagaagttccttgtgaaccaaaagggcactggtcacaagggccgctccttcttctgtcaggcctctccagcacgcccttggctcagccaaagaagagactcaggctgtgcttctgcactgttgggataacataggcctcttccatgtggttccacaccaggaacatggggacaatcagacctctcccagtgtgggcataaggatacaagatcatgtcaatattgacattcataatggctgggcgcagtggcacacgcctgtaatgccagcactttgggaggctgaggtgggcagattgcttgaaccccagagttcgaaaccagcctgggcgacttggcaaaaccagtctctactgaaaatacaaacaattggctgggcttggtggcgcacacctgtagtctcagctacttgggaggctgaggtgggaggattgctcaaacccagggaggttgaggcttcagtgagctatgatggcactgctgtactccaacctgggcaacagagtgaggccctgtctcaaaacaaaaacaaagacaaaacaacattcataatagtagcaatagctactatgtgccaagcccaggcacctcttcgagtctttgctgtcaccctatcaggtaagcgtgcttagaagttacacgaagcacacggctcagtgtttggcccacggtaagggcctaaaaagggatagccccagtggtggggatgctgctgctgctgaccattaaccccagtctgctccaccttcttccaggcagtctgtgagatgtttgatgtccgaggcaaacagcacattcagatccccaagctctacacctccagtgtgaccaggcacctgcaccacttcaggctcatgcaggactcacagcctttggaccgcagctaaaggacttgcttctcttcagcacacggggcttgtttgtgttggggtctgagccctgagcccatggtcaaggagacccccaggtctttctgaacagagacagctggcctgggggcctccctctcactgcgtgcaagaggctgttagggtgcaagactcaaggcgctgagggaggctgtttcaggagggagccccaggagggtggtggagacagaagggggcagcatctgccgaggccctcctgtgtgcctggcaccgtgtggggtttctggcccatatgggctaagtgaccctgcacactcctcttaggagagaggctcagatggagaaattgcagttcaggaaggtgaagcaagctgctagcctgtggccatgttgggatctgggcctcagccttccagccacgaaggcagccaagtgtcatgaagaaggcatcacagaggcaattccaggctgtagtggtgaactttccactctgcatccccgggtgctgtgccctgtgccctgtctaaggtagccctgtgggtttctatatgtttaaattgtccccagcatcaatgatgctctcctgtggatcccaagccatggagatgtcctgggacttttcatttttaggtacctaaattgaatttcccaacacacagaagcaagacagccgccctaacagactcttgcatgcagtgagagggaggccgccaggccagctgtctctgttcagaaagacctgggggtctccttgaccatgcgctcagggctcagaccccaacacaaacaagccccgtgtgctgaagagaagcaggtcccttagctgaggtccaaaggctgtgggtcctgcatgagcctgaagtggtgcacgtccctggtcacattggaggtggagagcttggggatctgaatgtgctgtttgccttggatctttatttgtgattcagaaacagtggaataaaaggaaaggaaagaaaacctgaatggccacctcagcaggatgctccaagggtagtgtccaggtggcactgactcagatatgtgggggcttcccccacccatgctcaagagccactttgccatttcaccatctctctgtcctccacacccctcagcagcaagcacaacaagaatgtgttcaccatgaagctcaaatctcagcagaatctagagtctgaaatccaagtaagggaaagtgtagagcttcttggatgatgccctgtcaattttattttaacgaatgaaagaccagaagaagtcagtcttgaaaggagaggacaggagcatctgctggcattagcagccgtgccatcgtaggaccgactcacctggacccgcggccacctgtgcttttacatctagtcttggttaaccatgggccacttttccagcttggaaactaagcatatgctccacttcctctccttcctcattgaactctttcactaaaagaacagtgcaagagagacttaaactgtttgcctcattcttaagacctttcaggaaaagtgttggcagggaaggaaatctcccagctctgggaaacagtcttgtggattatctgctggtttcattgatctgtgctgtcctccctgcattcattaggaaaactggccttggttcaaataagaacaggatttgtcctggtgacagagaaaggtttcttctgatgtccatatatctccgagggggatgctttctccaggcagaggctgtggccaagcgatcggggggctcagagggctgctgggaaggggtgggcccctctctccccagagggaaactcctggggacctctcgagcacccctgcccatcctttaaacataaattcataaatacaaacaagtaggccattcacagaaatatataaaatatgtcataggacgggtggcactctcatatggcaataattatgacaggggccggcaaatgacctgagtgacccggagtggcctgagcactgactcccaaatgccctccataggatgttctgcatccccgagaccctttcctgggtcctcctgggccctaccaccccctagaccatccagacctcaggtcatccccctgtctgttgacagagtagtctccgttcctgaatgtgctggtcaccagcaacagcagctgctcctcctccgggaagctcagcctatacttctacatgcagagaacctggacggcacccaggtggacctaagccttcagctcccagtagacactctgggtttcctaccctgcccagacactctgggcttccccccacacctcccctcggccggggctcctgtgtgcatctgtctctcccagtgcccagcacaggcgtggaagggaagaggtgaatggaccgatttgaacacatcatcctggattctccgttccctctcaagccctgcagctaacccatcggcaagccctggaggctctgcctccaaaatcctgcctatcccatgtgcaaacgcctctcaccatgtccactgctatttgcagttctgtgtgtgtggaaatacttccacaaatttggaatgaacaggtcacagctgtgcctggagggaatggccagggaaatgtgccctcgccttgctgttctatccaggcccacccagctgaggatgggggacctgccaccactctcctggcagttccggactcctgggaaccggcaggtgaggacccaagagtgttttcagtgacccggctgacctggtcatccgtcagtcccaccttggcctaggcctctatacagcacagatcacagctcattccatcctggcattacactggcctgtgccctgtcctcagggtcacatccgtctcccagaagccgtgcaaccctggaaaacccaggtctaacagtcaggttcctcctccgtgcattaacaatggagttgacgcctgctttgcggcacgctgggaggggagagggaggtgtatgctggagagctccccaggggcaaggcctggctctgcgtcacccactgtcagatcctgagagcctggggctggcccagcacgtggccaccgttccctaagagttggatttcatccctcagtgctgaaggcaggggatagagcttagacagaccccctgcgtcctgtcttctttatctacagctttctcatccttgcccctttcacgtgcacccggcagagcaggtgttcactgagcttgagcaaaattcaagctagagcagctgatggatcttgaggcctagattcactgtcaaagtgtttctcaaacggtgctctccagaacaccaaggaaaactcattgactgtgtaagtctgaaaatccctgcccaccggtctacctttgtgtatgagcaatcagctctaccattcagcccaggtgtgtgtttgctggaccatgtggaggaagctgaagagacgtgagctgaaggcagagggtgagtccaaggtgggatcttgggacaggtacgagaagttaggcaaaaatgggataattctagccttcataaccttagataacagttcacattattatttagttaatagaactgtacccacattaaatttcttaaatttttttaagagataaagtctcactctgtcacccaggctggagtgcagtggtgcaatcatggctcactgcttcctggaactcgtgggctccagcaatcctcctgcctcagcctcctgactaggtgggactataggcacacgccaccatgcctggctaatttctttgacttttctctagagaccgggtccacctaggtttcccaggctggtctcagacttctagactcaagtgaacctgaacctcccgcctcgacctctcaaattgctgggattacaggtgtgagccaccacacccggcctaaatttcttatgtgccatgggactgcaaaacatcattattaggggcagctggatggaaggtataggaggatactatagtgccttttcaatatttctgtctaaaatctaaaatcatttcaacaggaaacatttatttcaaaacatgaaggtggttatccttccatgagtttgaagtacaaaggcaggctcacggtgtcgtcagaattcagaacgatggtcgtggggctgggggtgctgggaggggctgggcatggttggctttgtgatctggggtctggtgtgttccatctctgaatctctctcgagctgcactctttcttaatacattttcataagtttaaccaaaaataaaacgaggacgcgaagcttgcttgggttgttaagcctagggaaattatccagccatgagccctggcccagatgcttctagaagcctggagggaactgagaactttccaagtggaggccgcagaggcaaggccctgaggtgggagcacactgctgttcgtccctagctctgaagggggtgccctggtcggaatcagtgctgggtgcagcgaaagccgatctcacccgctccgcagggtgttcagcctgccagcagggggccagctggtcctcctgggatatggcacggacccagcagctctgtctgaaatcataatggcggaaccaagggccctctacgtccaggtccgttgggaggcggggcatggagttccactgcaggaatctccaggaaccctgaggtcctccctgagccagggccgggctgggcacaccctgagtgcccacagggtaggtgtcttcccggacagccccaccaggacagggtgtggaagaacgaggtgcccgtggcggggaagctgaccaaatgggccgcgggaaccgggctggtgggcctggaggggcctgcctgtcccccttgcagagggtcttcccgccacgtgaagccggcacaggcctggatgccgacgacccttgctcgggtttggctgaaaggaaaacagacgcggtcagcatctccagtgagcccacgcaggcctttccgggctgggccccacctgcctgcatctcggagtcctcggggtctctgtgtggcccccgtggcctgacaccgaggacacgcctgtagtctgctgatcccagagggaggggtgcatgctgcctggcgtggggaagctgtcgtggcatggcgggtggctcctgggactgcccccagggttcagactggctgggggcttcctgccacacaccttcgtcccagggctgttgggcctgggatacggcccccagtcagaactcaggtgggaggggccttggatgtcacccagccccttgtcacctcacgtggggacccgtctccgcagtgggtgattgggcccggacgtgggtcaccctctgccctcctgggctgcccagtccatgccaggactgaccgttcccacttctggctgaactcttggctctggctctgggccctctccctgaatgctctgtgggtcagggacacggattcccttgtctccctggctccaggcttcttgtcctggcaaccttggaggagcgtgcaggagtgaggggcctctgctgctctctgaggctgtgggtgcttgcagggaggggcggggtctcccacaaatgggtctgggctcgtctagtaacttggagggccctgcgagggggagagggagacaccgtggaaagtgggagggggcttgttggagggtcttgcccacatccccctcctgcgtgcacagcatgtccagtatacacgcactgagcgcctgccctgaggaccggtgggcctcctgtactttcttagagtccaggaggaagaggaggaagaaaaggtgaagaggaaggcccaggtagtagggttgcgggtcccgggcactcccctactactgactaccccagagggtgacatgggaggggacatggcactggagcccacctgggggtggcaggtccccctgctttcttgttagtttcttcatagaggccctaagatgcttgagcacagtgtcctcatccctggcccaggtatcaacgaaccggttgcaaaaacgtgcccacgggccacacctggacgtcttcgtgaggcgctctagggacagggtggatatcaggccaggggagttacctgggaatggtcacagctcatatcccgtggccacttcagtctcctactgggcggtgccggatccttttgtggccaccccaggtgtccagatatacacaggagactgtggctggggggcgatccggacagggaagtgctcaccacactctcgactttcatctgggtcatgtgggggatgggctcggtgtcacagtgtcctgcccagcccacctggccagacctccctctgggccagaacagaggatcatgaggacagtgtgaggaagctgccctcgggccagtcggggtctgaccccagggctccccaggccccgctgggcacacgtagacttactctgctgaaccttaaaggcgattcttgttatcggcatcaacgcctgttcgccttctaccagatacacgtcccacaggcgcagggtgagcccgagagagatctgtggggacagcaggtgtgaaagaacctggtccttccaggctggggctggtggctcgagctgcgcacactggggcttcagtctccagagtcagtgaccttccccatgagggtcgcctgagccctccaggacgctgggtcagacaaggtcttgaagctcctcatggggggcactcatttgagtggggatgtggctcctggagagaggggcttgcccagggcttgaggcttccctgagccctctcaagtcgggtcctggcccagtctgcccatgaggctgggcctgagccccagccatggccctgggatgaccccccttgggcagagggttttgcttgtgtgtcctttggggtcccgcctgagcctcctgtgggctgggagtgagccagacccccgggctggggaagcagggcactgcagggcaaggaaggtccctgagccagggtctccctatgcctccttaccccgtcaatcaatatccggatgaggcagcctaacggggaacactgcccacatagatctttcttgtcctgatggaagcaacagaggtgctcaggccactgggctgccctaaaaacctccctcttccagggcctctgaagacccttcccctagtgcagaacactgggcggtgtccagagctccccacaacactgtcaccttcccacactcccggtggacacactgccctttgccctgctctgcgggagctgggcccccatccctgtgcctctgtctcctccagggcaggaaaggaaaccaactcccagcccatggagaacccgacgtcccaggtcaggccctggctgggactcagccagtcaccagccccacgaggggctccagcccccctgctcctacagccccacgggaggcagggcctctgggaagagctgaggggaccataaactcacctgatgccccatggtcttgggttgtgacgtggctaccacatgctcctgttggtcttggagcccctggacggtcccgccatttgggctgtgaaatcctgagaagcccccagcccatcatgaaatcagagccttcccccaagatgtggagccatcagctgcaagagctgggcagctggagaggcccccaaaccccaaggcctcccaccctcccatctggtgaccccaacatgcggcctttaccctggggaggtggggcgggaacattccctggagcctggctggaggttcccctggaggcctcctgggccagggtgcaaaaagggcaagcctgactttcaggccacgacagggtggccggaactgggtgggcgctgggcttcccggtcatctcctggtagtggggtcgggccagggaacaggggatggggagatgctgccacctgggcttggtcggcccattcgtgggcaccgatggcagcaggagcctgggcagctggagggcaggaggactctcagggaggggagagtcagctgcacagaatcagagccggagggcgtggctccaggacacagagggtggccacggggaggatgagatgccctctgctgatggggatgacaggcgtctgatttgggctttgggggtcagccgtggactcctgtgggaccctcagcagagacattctaaagtctcccaacaagctggcgacacaaggagggtgccttggctgaaagctgtgatcacccggccagggtggccatccccaggtctggctgcaggaggtccccggggcagctgttcacttaccctgcagggagtgcctctcactggccagcagctgcaccagtgcccagaatgcatcctcctcaggaagatagaggaggaacaaggcggcgatgtggctcaggtccctgcagtagcccacctcctgcaagagccagagtcaccatggaaggacatcacctgggagggctgaggtcacctgggaggactcatgtcattggagagggcagaggtgactggagaggcttcctctgaaggagaggcttcctctgaaaaagaggcttcctcaggatgcacattcatttcatgacaagagccaagtccatcaggcacttcagcaccttgtccaaaatgtctgctgatagcaccatcctgtgtgcgatgctgccaagctcctgggctttggggcagccccaggaggagggcgtcatttcttgttctgagaagtggtggtcaggcccaggtgacaccaggagtcccggccctgactcctttgtgtctcagcttgaccccttgagaccacccccttccttggaggtttatgccagcggtgagctgacatcctacctcctatatcctggtgggtcacaaatactaactttaaaagaagcaacgacacccccaccagacacccactcctgtcaatatggaaatatggcccgggaacctcactgccgggaatactcaccgggttatactcctcatatgccaggaggatgtggagtagttcccgctgcctaggaaacagagaaagggggctttggtttgttttgtgcagatgttgttaatttcactttgtctacaaagcctaacagcaaatcccatttcaggttcagatgtttcaccagataagcagtgagctcttcagggcctgagactcttgaagaaatgtttcagtaaaatccacatctgtgacatgcaaatagcccagttgtacagtgacttgcctgatccttttcactctgaatgattttttttttcagtttgcacacacgccagttcagtctgtgggtgtacagttcctccacggttccaaaccgatgtgcagagtctcccggccaccgctccagcccctcctggggcgactccttcatcctccaagtctccagggtggcccctatgcaaccagcctctccccgatccgtcagcccctggccacccagactgcttctcagtccctgtggtttggccttttccagaatggcctaggaatgggaatcctactgtggtagcttattgggtctggcttctgtccctcagcaaaatgcatctaggatccacccacgttcgtgcgggcatcaccggctcgttcccttttctcactgggtcttccgtttgaagggaggaccagccttgctctccccatccccgtgttgaaggccgtccccgaaggctccgtgtgtgagtgacgaggagtcaagcagtgaacctggcatgctggtttcatgtggatgtcagtttgcaaatcagtgggttcaatatctgtgacactttggggatgtgtggttcaagtccatcgagctttgtgagccactgcccaacgggctgccaacgtggctgtgccatgtcatgttcccagcggacctggatgagagtttccaggacccctaattctcccagcatttggtgctgtcactgttgcctggcgggggctcatgggccctctatcctgccaccctcccgtgggtcctaccatgggtccccatgggtcagggagagcacccttcaccattgtgcatgattttgtttgctgccttccatctcctcaggatcctcctgggttctggccccacatgttccagtctggcccagggcttggaaccagggaggtgctcggttcatggtgccggctgctccctgggccgggagagctcttggcagctgtgtcatccctcctgggtgaccctggcttctgctccggggaagcccccatccctctcattcaccccatctctgctgggaccctgtggctcccgtaggcttacttggttccgtatcgatccctgaagaatatatgcttccttaatgtcccgcttacgtcccggtcgatgcgctggatgtgctcagatgacctcttgcccttctccttcatgatctgtagggcagggccaagaggaggaagcagtctcagaacagatggaagactccctgcccccagtggcagtcagcccacagtcagcacttcgggaaggaaggacagaaggaaggtttccttctgcagaaagctgcattttggcttgttactgaagccagggagggtcaccagagctgagtttgtctgtggtgactgtgtcaccatctgtgcccagggtgttcatctgaccttcacccccagctccccagggtggtcttgacgttccctccagctggagacctgggcaccgacacggcctgtcctgtttgttgtgctctggctgagcgtacctggtatcttccggggtttttcatcttcatttcctcagtgttcaggaggactgaccacatcgggccccggatgttcatgggcattcccttgtacgctcgatctatgagctgtaggcagaaaacaatctggtgtcacaggccacggggtgaccccagtgaggaccagagcccggggattctggaaattgtcggttttggccccatgattcctcagtagaggtgagatcaagctgggacagggtctcccttcccaggactgaaagagtggatggacactcagagtcgaaactctgatctgaaccttttccttccttcaggtccccagggcatccctagccttgagctccgggtagtcccagccctagattcagattccctccctgcaaggtgacgcttgcacgaataggcaggaaatctggcgaccaggcctgcagtcctctgggcgaggacagtgtgccgcccaccctctgagaggctgatggtgccaggccacagccatgggtgcctgtcccctgtctctgcagagagtgcttcctccctccacacgttacctttctgctgcttttgtatttctcccagtctcccagcatatccacccacttgctctttcggctgatctcccgccgaatttgctgtcaaatgaggcatgttggagttagcggagctgccaggcttcccagagccgcccgcggatgctgggtcttgggctctggagccctggtgggagccagctggaaggagccagggaagggcagacctcaagggctgagagcctttgagcaaatgagcaccagtgggctggctttgggaccccgggatgtaccatcctcaggccacagacacaccagtcttaggtcccagcctctaggtggggtcctgacacaagcgcgcagccacccccaagccaggactgtggttctccttttggaattttatcaaactgccaaagtgaacagcaacctggggtcaggtccagcagggactgctgcccctcccagtgacagcgtgttgccctcacccgccaccgctcaggccagctgcttcctctgcctcactgaccacccgcccagtccctacgtccctggaccagcccctccacgcatcaggctcttaccttcgcctcccgcgcagtcagaggaggcagctccgtctcactgtaaggcaacccaggcagagctgaggaactgcacggggcctggagcggccccagcctgggtgccgacccccagaaaggactggctctgtccctttccagctcagggctcagcccaggagaaggcacagggaagggaggacaagggccttcctgtggggctgactcccaggaggggcaggacctgggagaagaaggagtgtagggacagcctggccggggttactggggcccctggcgtggggggcggtcaggctgcccaatggggctgcccgtcctggactcgaggtggtgctttctgctggagctgagaaaggttagccctgagatgggatgggggccgcccagggtgggcgaccgggccctgacaggagtccctcagggagtgaccacatccccccgccagggtcaagggagcctgccctgagacctgcccggtgtactctggctgcaccaggggcccaccccacttgacagccccaaggcccttgcaggttctgacctcccagcatccacctgcctctccctgcacccgagccacacaccctgcgtttcagaagtggcaccgctcgtcagctccctcccgccctacctccccagggatcctctgtctctccatcctgtgatccctgagggatgggcttctggctgggctcctcttacccggccccagatcccttcccagcaccagacccaggtctttagccgcgagccctgctgcctccctggcctcaccgtgagatgcccagaacggggccctgcccatcttctcccccgttctcctagggctacagcccccattgtcaccatgccttttcccctcacgggacagtgagggctgtagctctaggggaatgggggagaacaggggcaggtgggccctcagagacctgctggacaacagccctgaggctgggccaggcgtcccctcaccctgtggccataacccttgcatctcaccggggttgtctccaagtagacagggccagaccctcaggctgccccgctcctcttgtgctcacttgccgacagaactgctgagcgcccaggggcctgacctagcccagtctccattcccaccggctccctagatgggccccacacctctggcctaacaacctcgggctggacctgcaggggagtcagggaggagttctgtccctggaaaggaggttgacccgacctggtgagacatgtcctgcgtcagaaaggcctttctaaaagcaaacccatccctgagctgagacaggtgctttaggggtgaggggagtgcagaggactcactgtacaatccccaaatgatcgacgttgttgttgtagcttcgaaaaggcttaggccccttgtcctctggcagcccagctcggtgtccctgtagcccagagggagccttggtgaggggtccaaggtaaagggtgcaagggcctgggggcattggccacccgtccctgccctgtgctcctagggagcccaggaccctttgaccagggcacactggaagaggcctccctccaagaagcagaccgacttgtaccttttcgtatttcataatgatgtcctctcgctcttgtgcccaccaactgcccgcgacctctaccacgtccatcctgtgagacagaattgtctaaaggtcacactgtacgcggcggcttcggagaacacctgaaccgctctcgccgggctcccagatgctggctggctgcgtaacccccattccaccgccgcccccagggaaaaaggggccagacccagtggcccacagctgctccagtctctggagtctcaagtcccaagcaggggtgggcatcttcccaaggacttgagtacagtgggacctagacagagaatcctgttgtcccccaatgccatgaaatggggacacaccggccccagcaggttgaatggtttccacctgccaagggtgaagggcccatgatgggctattccagggatgtggaggcagactggggtcagcgaccagaggtctctgtgcaatcggcctcctgggatgctcagggcctcagcgatgcccagtttcctacagggaacaagatctctcccgactgctcggttctactccgctcatcactttggctaccgtggctcttcagtctgaacagtgaagccactttaggaataacgcctgttgagcaggagggtgttgggtttggaggatgaggaagatctattgtacgcatggaaaccacgtctctcgcggagggactgtggagtccaccattctgagccgtcccaacaggaggaggcttcattttcctgggtcactgaggaagaacagtgggtccttggtcctggagaacagctggatggaccgtccctcctgggaatactcgaggcaaaaggagggcgaggcctcaagaggaccacgcagagcaagaaatacctggggagaaccctagtgcccggacccctttgaacacaagggaagatagtctcccctcagccagccctccagggctccttcattttccacagctgcccaagggcagcaggctcccccggacaagggaccatgtgtgttcagtggggcccacagcgaccatcaggacccagcttagggcacagaggtgttctgaggaccgtcagtggatctgtaccagtggctctataccagtggctctgccaggaccaggctctgccccatcgggatgggaaacctgggcagatttgggatctagggcagggaggtcacagggttcaggcctgaattccagcacagcacacggcagggctgagagcaaaactcagggtcatgtccggattcccaggccggttactgcctctctgaccccagacgtctcatctgtcgaatggggacatttgggaacagcacccactctacgaagccaccatggagacgaaagagccaatcgtctacacgggcagtgtagaacgggcgcctggtgagtgctcagggatgaccctcctcggtagctgccccacagaggccaacaccgcccgcaccgtagccactgcccccaagtccgcctggagggaagagagcaggtcacgctcacctgattctgatgaatcagctggcctgggtcatgcctctcagggagaaaacctttgagtccacagagctgctcacagataccactgcctgtgtgtaactgctgtagaccactgaggcagaccagagagcagataggtgctaagcaccagtgacattctgaggtcatggcacgaatcacagtggggccttgcccgggtcagcagcgcccagagtcagggtcctccgctgcctgaggcgtcaacatgcctgcctgcaatgtgtttgtgcacgtgcgtggacatgtgtatgtgggtatacacatctgtgcacgtgtgtgctgcttctctggccaggcccggctgccccactcatgtgtgcacccagttcctcatcactgtcacccccgaggcccagggccagcatcagagcatccatggctgctccctaacctcagccctccccgcccagggtggtcctgggatacacataggggtggagggaagtgactgctgctgttggatctcagaatacaaaagctagtactattacctaatggtctttttagtgtctctaatggtatcgctttttcatttctgatattttaactgggtatttctctccatgacccttggatattctagctagaggatcctgtggggaaagtgccgggcacacagtaggggctcactcttctagacatgttatctaaaacctggctcatctgtccttccacacagggcctaggggatgccaaattccaggggccagaaagagcttgggataaaaagaaacttcaaggggacggctttgacctgggctgagtctgcctgtgccatccaactggagtctcaagtcctgaggcaggacgtccagatgccccagtgcagggtcctcctgatcaacacctgctcccctgtactcattagcaacctcacccaccctactctcaaagcacacttggctctcgtatccaggagctctgcatctgtagattcagcaacagcagatggaaaatattcagaaaataaattggacggttatgtttctattgaacatgtgcagagtttgttcttgtcattattccctaaagaatccagtatcacgaccatttatgtagcatctgcattgtattacacatcatgaataatccagagatggtctaatgtctacgggaggatgtgcatagctgatatgtaaatactaggccatgttatgtcagagacttgaggatccatggattttggcatccccggggaccctagaactaatccatggataccaagggatgactgtataaactcactcaggaaggcttctcattggaggaaggtcccagttcaggacacacagggacatctccctggactactgtccattcatccatccattcatccattgtctccccccacccccccatctcggactgtcccagtgacagccctagcaagaagagacaagaaacaagttcacgttgtccagttttgaggtaatggaagaagttgcaccagtatgagaatagtgggtcagttttctacaggatgcagaaagcatatcaggcagcctcggggtgcggaaaggagcctggcctctctagcagccacacaggcctgcagtaggatggggctgtggctggccatgtggatcacttgggcctcatgaggggaaaggaaataccaggggggcagaagaggagcatgggggcagctggttgcctaaggagaaggcacctcagggaaggggactgtattcatttgttttcacactgatgtaaagaaatacctgagattgggtaatttataaaggaaacaggcttaattgacttgcagttccggaaacttacaatcatggcagaaggggaaggggaagcaggcaccttcttcacaagatggcaggagggagattgtgcagtggcacaatctcggctcactgcaacctctgcctcccgggttcaggcagttctcctgcctcagcctccctagtagctgggattacaggcatgcaccaccacgcctggctaattttgtatttttagtagagacagggtttcaccatgttggccaggctggtcttgaactcctgacatcaggtgatctgcctgcctccgcctgccaaagtgctgggattacaagtgtgagccaccgcgccaagccatatctgttctttttttttttttttttttttttgagacagagtctcactctgttgcctaggccaggctggagtgtgcagtggtgcgatctcggctcactgcaaactccacttccctagttcaagggattctcctgcctcagcctccctagtagctgggattacaggtgcatgccaccacacctggctaatttttgtatttctgtagagaccaggtttcaccatgttagctaggctggtctcaaacacccgacctcaggtgatccgcccgcctctgcctcccaaagtgctgggattacaggcatgacccaccgcgcctagtccatatctgttcttttttttttttttttttttttgagacagagtctttctctgtcgccaaggccggagtgcagtggcgtgatcgcagctcactgcaacctccgcctcccgggtttaagcgattctcctgcctcatccaagtagctgggactacaggcacctgccatcatgccaggctaatttttgaatttttagtagagaaggggtttcaccatattggccaggctggtctcgaactcgtgaccttgtgatccacccgcctcggcctcccaaagtgctgggattacaggcctgagccaccgcacccggctagcctgtgtctgttctttaaaattgttttgttttccttactctcagattcttcttgctgcttattgtgccttgttgctgcctgttgtgcaatttcttccctcttgtattttactgaacttcatctgaagaagccttagtagccagataaacaagcttgtttgggctaaaaaatcaattgctgtgtgagagtttgttggattctcttctgagtaaagggtatgtgttttattgtacggactttgtatcacctattttggcttttcatccaggcctttttttttttctttctttttagcttcctggttctagatacaactgatactctgatacaacctgggtaaatgtggtcttgagtagtaaattatctgtgaagcttctccgaactttgccacataaatgagcctgctcttgttgtgaagtaaatcttactctaatctgtatgtgagtcagttggaaataactgagccttcggatggcttttgttgttaactgagattagttctctagattttagtgattttgttttgaacaccatacaagtatgtggttcttggtttatttggtcacttgtaatctctttaaaattttattttaaattaggaagtattttagaaatacaagaaagtcacacactatgagattaaacagatgttaacattttgccccattttcatcagactgtgcatgctttttttgggggggaataaaatgtcacagataccactaaagcccgtttccatctcgtcccaccctgcctctagaagtaacttctttcttcaggtaggtgcgtattattcctttttattcctacgtatagtttaaaactttaattgcatattagtagccacaaacatcacataccaatattctgtgccttttgcatttttacattaatggtaattatttttgaccttctgcaaatggctcttttcagtgtttcttgttagaaaacttggctcaacttgagtttactaattatctgcttcttcttgtctttagctattatagaactgttccaccaaggcaacaattattgctattttaatggtgaaatcagttttattaggcaaattgactcaggcttcagactggcatttggaattgtcacactggagattttcttttactgaagtctcaggacattgacaatcagaaaaaaaccctcttgagtcttactatcgtacatgtaagatatgttcctgagtgactatagtaaagactcattcaggaaaatgttatctccgatttctgcctccctagctcataggaaacttccattgtaaagttgttaccaggcgtcaagctgcctctttggtacagcccttacttagtatttggctcagttgaagtgcagtctatataggaggccaagaagacttaatcctgggtttgaaacaaagcaaggatacactaacattctatcctttaataacatcaagtagaaaaattgaaaatgagcttgttatcagtgcacttttatatgccaaccttgtttcacttgtgttttaaactgggaaactgaagattttaatgctgaaatttctttgaattattacctgtttttttgatagtggaacacacagctaatatttactaatatgaaggtgtcaaaggtgagaaatcatgtactacaccatcaggtcagcactactgtttggaagagcagcatcacaaagagcagtgttatactgcgttgtagtcagcacatacacttatgtccagacagatattttaaattaccttcttggggtagtacacatatgctgatatccaaagtgccatataatacaatacatagtttttaaacttcatatcattctgatcagaagctttataaactgttaggtgaatgctgttagatgatatgagagcacaatttaacctgtgtgtgtgtatatgtatgtcttaacatctattaagtgatgactacatatgaggcactaagtgctaaaacagagactttacatagattatcccattattggtcaactttttaaataagtgcatctctaatataagacaagatgctgaccaatttttaaaatgtgaatggatttctatttttaagataagtacctttgttcctttggttcctccctcccacccttccagaaatggtagtatcctggaaaaaaaaaattagtagcaattcaagaaacagcttaattcattagtataaatagatgagtttcccctaaacacaggaggagttggaaggtacttgaaattggatgttgtgcatggtgcctttccaaaatgcacaaatactttctctcaaatggttgcagtagtaatgtgctgtgtgatttggcatgtataatgttgtacaggtatcttgacattggtggattaactgcttggctactgtgaaattcactgtagatgttgatggatgaaagtgtggttgcctaggtaatgattaagaccagtaactaaaccacagttattattttgctggcataaacttcaaactcagaaaggtttttattcattttacccattggagcataccccagtaagtgcttcatttctttgtgtttctgattttttttttttttaagatggagtcttgcttttgtcgcccaggttggagtgcaatggcgcgatttcggctcactgcaacctccacctcctgggttcaagcgattctcctgcctcagcctcccgagtagctgggattacaggtgcctgccaccacgcccagctaatctttgtatttttagtagagatggggtttcaccatgttagccaggctggtctcgaacccctgacctcgtgatccacccaccttggcctcccgaagttctgggattacaggcatgagctgccgtgcccagccatgtttctgaatttttaagtcaacttctgaataggcaaagaattctttttgtttttttgttcaactttagtgctataaatcgccagttggacacaaaggttttagtgctatttaggtatgttttggtgaaatagtgtgaaggaatattgctgcttaaaagataagccattcattaaatgacgtctttgttttgaaacatgaagacttatgagaagcatttttttttgtaagccaaagtagtttcactttatgtgttacagattttgaatagctcattatagactttgcaatttactgtctctcatttaggcaggtaattttagttgccagctaatcatgtttaaatatgtattggttattaataaatgattacccgtatacaggtctttcatgcagatatcgtactactctgatgttcttacctagttttgtggtatgttcagttgtctaagagcattgttgatctgcacacagattttgtttggtctatacagtgtttctgaaaacttgaattagttaccattaataaaaaatagagagactgcacatgaaatctgaatttgtagcttttaaaaaaaaaattggaagatcaggccaggtgcggtggctcatgcctgtaatcccagcactttgggaggccgaggcggtcagatcacctgaggtcgggagttcgagaccagcctgaccaacatggagaaaccccgtctgtactagaaatacaaaatttaccgggcgtggtggcacatgcctgtaatcccagctactagggaggctgaggcaggaaaatcgcttgaacctgggaggcggaggttgcggtgagccgagatcacgccattgcactccagcctgggcaacaagagcaaaactccgtctcaaaaaaaaaaaaaaaaaattggaagatctgtcagcactaaacctgccagtcaccatagcgataattctttggctccaagaaatggctaccacctccttcttttaaggggttgtgcacagcttccacatggcttgctacacttacctgcctcaggaagcatttctttgtgatttagggcatctgtgtttttgttattttagatttagaacattcaaatgtctggaaatgaatttgaagttttgtttaaaacaaaacaagttttgttttaagcaaggttatgactaaattgaaaaatgcacaagaggccaggcgtggtggctgacgtctgtaatctcagcactttgggaggctgagacgggcgaatcacgaggtcaggagtttgagaccagcctgaccaacaaggtgaaaccccatctctactaaaaatacaaaaattagatgggtgtggtgttgcacacctgtaatcccagctactcaggaggctgaggcaggagaatcacttgaacctaggagatggaggttgcagtgagccaagatcgcatcattgcactccagcctgggtgagagagcgagactccatctcaaaaaaaaaaaaaaaaaagaaaaatgcacaagagtgttaaacaagcagttcacagtggaaaaacttaatggcgcgtgcacacacacacacacacacacacgagaaaagatgcatagtaaccaatgttattagtaatcagggaaattctgattaaaccaatggactatcagtacaaaaatttttttttttaatttttgagacaaagttttgctcttgttgcccaggctggagtgcaatggctcaatctagctcactgcaacctccactacctgggttcaagtgattctcctgcttcagccttccaagtagctgggattacaggcacgcaccacaggcctggctaattttttttttttttttttttttttttttagtagaaatggggtttcaccatgttggtcaggctggtgttgaactcctgacctcaagtgatccacccacctcagcctcccaaagtgctgggattacaggcgtgagccactgtgcctggccaggactatcatttaatacccattagattgtcaaaaatactaaagtttttcagaacatgctgaaagtgggatttcttcattctttgctcatgggaatgtcagttgacaccactctagaggataatttggcagttcttggtaaagttgaagatttatgtccaacaatccagaaagtccactattaggttcctttccatggaaaaattctctcatgtgtgcacaggaaaacatggaccaagatgctagtttgtttgtttatttatttatttatttatttttgagacagagtcttgctctgttgctcaggctggagcgtggtggcacaatctccgctcactgcaagctccgtctcccaggttcacatcattctcctgcctcagcctcccgagtagctgggactacaggcacctgccaccatgcccggctaattttttgtatttttagcagagacggggtttcaccatgttagccaggatggtctcgatctcctgacctcatgatccgcctgcctcggcctcccaaagtgctgggattacaggcgtgagccaccgtgcccggccttaatttttgtatttttagtggagatggggtctctctactctctatgtcagccaggctggtcttgaattcctggcctcaagtgatctgcctgcctgaccctccaaaagtgctaggattacaggtgtgagccaccacactcggtggtaagagttattgtataaagttttgacataatttatagtatcagccttcttcctctatcctcacagaaggcctcatggtgagtttgatgtgcaggttaaaatatataattattgcaatatgttgtaagaaatgtttcctaattaagatttttatgaaattaaacgtatttatttatttattttgagatagagtatcactctgttaccaggctggagtgtagtggcaggatttcagcccactgcaatctctgcctcccgggtttaagcaattgtcgtgcctcagccccctgagtagctggaattacaggcctatgccaccttgcctggctgatttttgtattcttttttttttttttgagacgtaggctcactctgtcgcccaggctgcagtgcaatggtgcgatctcggcccattgcaagctcacctcctgggttcaagtgattctcctgcccctgcatcgtgagtagctgggattacaggtgtgtgccaccagacctggctaatttttagtagagatggggttacaccatgttggccaggctgatctcaaactcctgacctcaagtgatccgcctgcctcggcctcccaaggtgccaagattacaggtgtgagccgatgcccccagcctatttttattttttgagacagagtctcactctgttgttcaggccggaggtcagtgatgtaatcatagctcactgcagccttgcttgacctcctgggcttaagggatcctcctccttcagcctctcctgtagttaggactataggtgggtaccatcacaccctcctaatttaaaatttttttttgtctcactgtgttgcccaagctggtcttgaatttttgacctcaagtaatcctcctgcctcagcctcccaaagtgttgggattacaggcatgagccactgtgcccagccctttaatagtttaaaatcaaagtttaagtagaaaacattattttatttggctcattggttagatgtaagtgatgtgaaatacttaaacatccattattgtttttaatataatttggaaaatatgagttgctttggattattaaaacttcatttatttgtaccattgatgcataaattctcagtctaggttttagcgaagtctggattttaaaaaattgactgtgatattagttcaagtcttacgaacatcattattattattatttgagagacacagagtcttgctcagttgcccaggatggagtgcagctgcacaatcacagtttattgcagcctcaacctcctgggctcaagcagtcctcccacttcaacctcccgagtagctgggactataggcacacatcacaactcctggccaatttttgtattttttgtagagatggggtttcgccatgttttccaggctggtctcaaactcctgggctcaagcgatcctctttgcttagcctcccaaagtgctgggattacaggtgtgtgccaacacacctggccaagttgtatatactattaatctaggctatttctgacactgttgattttccttttccccttaggtgaggcaggcgactaatcagattgtgatgaattgtgctgatattgatattattacagcttcatatgcaccagaaggagatgaaggtaagagctgttttccattttaatttgctgtctgcatgtgcatatgtggggtgtgtgtgtgtgtgtgtgtgagagagagagagagagacattttcaggttaagacttcagtgtttgttactttagaaatgggtaaattcagctgggtgaagtggctcacgcctataatcccagcactttgggaggctgaggcgagcagatccctgagcccatgagtttgagaccagcctgggccacatggcgaaacaaaaacaaacaaacaaacaaaaatattagctaggcatagtggtgcgtgcctgtagtcccagctatttgggaggctgaggtgggaggatctattgagcccaggtggccgaggctgcagtgagccatgactgcgccgctgcactccagcctgtgcgacagagtgagaccctgactcaaaaaaagaaaaagaaaaagggtaaaatgtttatgggaaatattgaatagtataacctaacagtattgtgaaataaatgtcacaatttattttacttttaaatttatttttatttttattttttttgagacagagtcttgctctgatgcccaggctggagtgcagtggcatcatctaagctcactgctatctctgcctcgtgagttcaagcagttctccctgcctcagcctcctgagtggctgagattacaggtgtccaccatcatacctagctaatttttgtatttttagtagagacagggttttgctatgttggccaggctggtcttgaactcctgatctcaggtgatctgcatgcctcccaaagtgctgggattacagatgtgagccaccacacccgggcaaatgtcacaattaaaattccacttccaagattaacttattttgtggtactagggaaatcatattttcataagtataaaatgaatataatacgcataataaagctgatgagttatttgaaaaattaagtactttgaacatgaaaggctcctcaaagaggcttcgtttttatgtttttcttaaagtttttttttctttttgtactatagtttaaaattgagataagtcatactcctaattcagagaaaaacatttgctttatgagacaatatgaagattagaagctaaataatggagttagttacaggggaagaacatgctaaaaagaaacatggtatagaatgtggaactcgattagtgtctataaaatgagaactgttttattttattttattttttatttttttttgagacggggtctcgctctgtcccccagcctggagtgcagtggcgcgatctcggctcactgcaagctccgcctcccgggttcacgccattctcctgcgtcaccctccggagtagctgggactacaggctcccgccaccacgcctggctaatttttttgtatttttagtagagacggggtttcaccgtgttagccaggatggtcttgatctcctgacctcgtgatccacccgcttcggcctcccaaagtgctgggattacaggcgtgagccaccgcgcccggccgagaactgttttagaccttataattttagtatgaaagtagtccattttgactggaaatcttattcccgtatgagctgatttttaaatagataccaagtttggcataaactcttacaagtacatcagtattggagctggattgctttttactttttttttttttgagagagtctcgctctgtcacccaggctggggggcagtggcatgatctcaactaccacaacctctgtctcctggtctcaagccatcctcccacctcaccctcccaagtagctgatattacaggcgtgtaccaccatgcctggctaatattcgtatttgtatttttttatagatatggggggggtcttcctatattgcccaggctggtcttgaactcctgggctcaagggatccgacctctttggcctcgcaggttgctgggattacaggcaagagccaccacacctggttgcctttttacttttgatttcacctagacattccttgtcaaaatggttattggttactctgagacttctttaataaaaaataatttaaggccgggcgcagtggctcacgcctgtaatcccagcactttgggaggcccaggtgggcggatcacaaggtcaggagatagagaccatcctggctaactcggcgaaaccctgtctctactaaaaatacaaaaaattagcctggcgtggtggcgggcgcctgtggtcccagctactcgggaggttgaggcaggagaatggcgtgaacccgggaggcggagcttgcagtgagccgagatcgcgccaccgcactccagcctgggcgacagagcgagactccgtctcaaaaaaaaaaataaaaaaataaataaaataaaataatttacacatttgatcttttaacttacattttatattttgatttcctctctcctttacattatactgaaaagaagtttcattttaaggcctcataacatttatgattttttcttaaactattttgtctatagaaagtcaaagtagtagcagttgaacatactgttccgaagaagtacttaagttcaattgattgtaaattagatcaaactgctggaagaacagattcttcaaatggacttgaatgagtgccacttttaaaaaattgtctggtaaatgaaagagtgattatttaatttctttaactgtggagaaaaatagaagtactttagccaggtatatcaaagcaacaaggctttctttgttgcaggtagagaatgtttaaattcgatgtgtggttttaaagtggtatgtagataggtagatctagtaatataaatgtgtaccttccagctggcatggtttcagctcaagtttgttttttatcttcctgtactaaaaatgtcgggatagaattcaggtgactgaaaagttctttttttttttttttgagatggagtctagctctgtcgcccaacgatctcagcttgctgcaacctccacctctggggttcaagcaattcttctgcctcagcctcctgagtagctgggattacaggcgtgtgccaccacacccggctaatttttgtatttttagtagagatggggtttcaccatgtttgttaggctggtcttgaactcctggcctcgtgatccacccgcctcagcctcccaaagtgttgggattacaggcgtgagccaccgcgcccgacctgactgaaaagttttgaatatgtgtaaccgaatgttgctaagctcataatgatctgtatctcacggaagcccagttagtgttcttactaagagagtcaggagagaaatgaaaacttaatggaaaagaagatttgaagagagattctgataaaacattaaattattttagatacataatatatattcagtgctgggtgcagtggctcacgcctgtaatcccagtactttgggaggctgtggtgggtggatcatgacgtcagaagttcaagaccagcctggcgaagatggtgaaaccccatctctacttaaaataaaaaaattagctgggtgtggtggcgggtgcctgtaatcccagctactcaggaggctgaggcagagaattgcttgaacccaggaggcagaggttgcagtgagccaggatcgtgccactgcacgccagcctgggtgacagagactctgtctcaaaaaaaaaatattttccttcagaactagctaaggtacatttctcaacacttttctaccacagcaacaggaaaaaacctgaagtcatgtgtaagcccatgtaattttagagtttaagagaatgggaagttgtatgagttgttaaagtttgaattgggggcagccaggtgtggtggctcacacctataatcctagcattttgggagggctaggtgggcggatcacctgtggtcaggagtttgagaacagcctggccaacatggtgaaacaccgtctctactaaaaacacaaaaattagctgggcgtggtggcaggcacctgtaattccagctacttgggatgctgaaggcaggagaatcgcctgaacccgggaggtggaagttgcagtgagcggagattgtgccactgcacgccagcctgggcgacagagcaagactctgtctcaaaaaaaaaaaaaatagtttggattgggaacagggatagatttgggcttccacatgtatgtatgtgtgtgtgtgtgtgtgtgtgtgtgtatatatatatatgtaataaaaaagataaaagtaaaatcagaaaattacttttaaggcatgaaattgttgcttcttttaattttttttttttttctttttgagatggagtcttcactctgtcgcccaggctggagtgcagtggcgcagtctcggctcactgcaagctctgcctcccgggttcacgccattctcctgcctcagcctccccagcagctggggctacaggcgcacgccgccacgcccagctaatttttgtatttttagtagagacgggattttaccgtattagccaggatggtctcgatctcctgaccttgtgatccgcccgcctcggcctcccaaagtgctgggattaaaggtgtgagccaccgtgcctggccaattgttgcttctttgtgtaagtttttatttgaagaaaaaggccatttttttgtgatatgtgcagtcatcctaaaagacctatgggcatgtgtctgtttttttttttttttttttttttgagatggagtcttgctgtattgcccaggctggagtacagtggtgcagtatcggctcactgcaactagtagaacttttttttttttttttaaataacttgttttaaaataatccttaataggcttttattaactctgtttggatattagttatgtacccttttctctttgcaaaaatgaaaaatcatttcaagtagaaattaaaggtttgtttctcatccctttctttagatatagtaacagttataccagatatatatatatatatgtttttttgttttttttttttgagacagagtttcactcttgttgcccaggctggagtgcaatggcatgatcttgctcactgcaacctctgcctcccaggttcaagcaattctcctgcctcagcctcccgagtagctgggatcacaggcgtgcaccaccacgcccagctaatttttgtatttttagtagagacagggtttcaccatgttggccagcctggtctcgaactcgagacctcaggtgatccacctacctcggcctcccaaagtgctgggattacaggcatgagccaccacgcccggcccagttataccagatataagcaaatttgctagtagtttagatttctggaattgtgccaactacacatcaagagactatttagctttgttacagaagtcagtatcagtttcttgttataagacgagacctggttttacagacttttctatttctcaatggaactttactctgaagatatactcttccatttaaatactagttccaaaacctacattatatggtggcagcttaataaacatttaacattttggttaatttaaatcttgttgatgtgtatacatgaataactgggctaaaagcagatacctttgattattgtgaaacttcaagtaaatattgtgtgaaaaggaccccttctgtctcacaaattctggcccctcagctcattgtctgaacagtgattcccttgcatataataaattcccttggcttatatataataataaatgaagtttattatttatttgaactttttacccctgtaaataccaaggttctttttgcctaagtggtaatttgtgtcattcaaagagtttttattaaatattattattattatttgagatagagtctcactcttattgcccaggctggagtgcagtggcactatctcggctcactacagcctccgtctcctgggttgaagcgattcttgtgcctcagcctcccaagtcgctgggattacaggtgtgtgccaccaaacctggctaatttttaaatttttgtagagatggggtttccccattttggccaggctgctctcaaactgttgacgcccaccttggcctcccaaagtgctgggattacaggtgtgaaccactgcaccagaccttaaatactctgtttaagtgatagtttgataagtgtgaacgcaagtctgaaataggtttctttgcttgtgagaaagtataacgaattgccaagacaatagtgacaaacagagggcatatttttcaaagaggaagagtttatatagtgttaacattaagacaaaagtcttaagtttctaatttctgatcttgtttgttgggatttcttttttttttttttttttttgagacaggtctttctctgtcatccaggctggaatgcagtggcacagtcatggcttactgcagcctcctgggctcaagttactctcccaccacagcctcccggagagctgggatggcaggcatgtgccaccacacctggctaattttttaatttttgtagagatggggttttgcaatgttccccaggctggtctcagactccaagactcaagcagtcctcctacctcagcttcccaaagtgctgggattacagatatgagccactgtgcctggcccttgtttggatttctatgcttatctgtgaagtatattctggtttctatgcaggatagatccattctcaaataaacaacccttaagtatcattagttcaaactggagccaaataaatgtcagcattagaaggagcaagtgatagttagccagcccctttattcctttttagtgcaaatcagagataaagaacatgaagtttgcagtgtatttgcattctttcatttttacatttgttggttttgaataatattgaggggctgtctgataaagaacctgtgtaggtttccatatggctatatacaaagtatatgagcgtagaatagttttaaattttgtcttagttatacttggtaagttttaaaacgttatttaaatagccttaaggtgatatggattgctttagtgactgctgttttaggaatttagttggcttattgctgactatagagggaacgttttatcttctttttaacctccagttcaggttaggtgcctaaccaagtgaaacatttttcataatataatgtttaatagtgataattataaaaataatgatgagtttagtgtttactctataccaggcactaagtgcattacctgttcatatagagaacaaccgtaggcacagagagggtatctactttaggtaataaaactgataaatgttagagccaggattcaaacccaggcggtttggatctagggtccatgtacttgccactctattgcttgtcattaatgtaaccacaccatattgcaattatttgtttgtgtcatgtctgtactacttttcaatggaatcttaagatccttgaggggccgggcatggtagctcatggctgtaatcccagcactttgggaggccgaggcgggcggctcacctagggtcaggagttcaagaccagcctggccaacatggtgaaacctcgtctctactaaaaaaaaaagtacaaaaattagctgggtgtggtggtaggcgcctgtaatcctagctactcgggaggctgaggtgggagaattgcttgaacctgggaggcagaggttgcagtgagccaagatcacgccattgcactccagcctgggggacaagagacttctactcaaaaaaaaaaaaaaaaaagatccagtaattatgattcattctttttcatttgtggttttccctggtatctgacatatagtagggatttaataaatatacattgaatgaaacgaagaaaatctagataaatggagtaagtctgtcatacagtagttcctccttatctatggcagatgtgttctaagacccccaatggtacgcctgaaaccacagatagtagcaaaacttatatatgctatgtttttccctatacatatgtactatgataaagtttaatttttacattagaaatagtaagaaattaacaaaagctaataaaaaatagaaccattataacaatatactgtaataaaagttacatgaatgttgtgtgcatctctctctcttttcttttttttgagactttgctctgtcgcccaggctggagtgcaatggtgcgatctcagctcactgcaatctctgcctcccaggttcaagcgattctcctgcctcagcctcctgagtagctgggactacaggcgcatgccaccacacccggctaattttttgtgtttttagtagagacggggtttcaccgtgttagccagaatggtctccatcttctgacctcgtgatctgcccgcctcggcctcccaaagtgctgggattacaggtgtgagccacaatatctttttttttttttgagatgcagtttcactcttgttgcccaggctggagtgcgatggtgtgatctcggctcactgcaaccactgcctcccgggtttaagcaagtctcctgcctcagcctcccaagtagctgggattacaggcatgcgccaccacgcctggctaattttgtatttttagtagggacagggtttctccatgttggtcagcctggtctcaaactcctgacctcaggtgatcttcccccctcagcctcgtaaagtgttgggattacaggcatgagacaccgcgcccagccaatatcttctttttaaaaaaaattatttcatttatttatttttagaggcagagtctctgttgcccaggttggagtgcagtggtgccatcatatctcactgcagcctcaaactgctgggctcaagtgatcctcctgcttcagcctcccagttagctaggactataggtatgcaccaacacacccagcaaatttgtaaaaattttttgtgagtcaggtctggctttattgctgaagttggtcttgaactcctggcttcaagcgatcctcctgcctcagcctcccaaagtgccaggattacaggcatgagccactgtgcccagcctctcttatagtatcttattgtattatactcactcttcttctttgacatttccaaactgctagcatcactactcttgtgctttgaggccattattaagtacaataaaggttacttaaacacaagccttgtgatacattgacagtcaatctgataactgagatggctactatgtgactaatgggctgggtggcatatatatacagcatggataggtcggagaaagggatgattcatgttctgggcagaatggaatgggagggcacaagatttcatcacactattcagaacagtacagtttaaaacttatgaattgtttgtttctggaattttccatttaatattttcagactgtagttgactctaggcaattgaaactgtggaaagtgaaactgcagataagggggacttgtcaggtctgcatttcttcatgtgctctatcctagtaactttatgggtaacaaaattatttcgtatttgagattattttgttaccagctttaacttgtattttacttccctttgaggactaccatcaagatacttactaattgtaaagattctttacagtattttaaatattaagaaaatggagagcataaaaaactgctgtaaattatgtagtttttgcattaaatgtagagaaaacactgattgcataatgttagtaacattgtagtgtatgctgttcttttttttttttttttgagatggagtttcgctcttattgcccaggctggagtgcaatggcatgatttcggctcgccgtaacctcagcctcccggattcaagtgattctcctgcctcagcctcctgagtagctgggattacaggcatgcaccaccacagccggctaattttgtatttttagtagagatggagtttatccatgttggtcaggctggtctcgaacctccgaccacaggtgatccgcctgcctcagcctcccgcagtgctgggattacaggcacaagccgccgcgcccggccatgtatgctgttcttaagtgtgaagctggaagagttagttgttctccaaatcaatgcttccttactttttttcaaggcattagtagaaactgatgttttcctggtacataaggaagaggaggctcacaactggagggtatcagagatctttcattgctctaggcctaccaggctggtccaagggccaagggaattattatcttgataaacctgtaatacatgtttggatctgccacagttagggaagctctgctatagtttcaagttaatagaattagaagggaagttaggtagtagtcagggctcattttatttatttgtgccttctgttttacttttttttttttttttgaaatggagtcttgtgctggcgtgacctcggctcactacaacctctgcctcccgggttcaagcagttctcttgcctctgcctcccaagtagctgggactacagacgcaggccaccacgcccggctaatttttgtatttttagtagagatggggtttcccatgttggccaggctggtctcgaactcctgaccttgtgatccacctgccgtggtctcccaaagtgctgggattacaggcatgagccaccgcacccagcctgttttacttttttcttgatcccagatctttttcagttttcttgctttttttctcaaagaactaaccattgctttgtagacctcagttaactattatttccttattaacttctgcttcctttgggtttactttgcaaggttttttttttttatttttgagacggagtcttactctgtcacgcaggctggagtgcagtggcgtgatcttggctcactgcaatccctgccttctggtttcaagtgattcttatgcctcagcctcctgatagctaggattaaaggcatgtgccaccacacccagctaatttttgtatttttagtagaggcggagttttaccatgttggtcaggctggtctcaaactcctgacctcaagtgatcggttcgccttggcctcccaaagtgctgggattacaggtgtgagccaccgctaccgtgcccggtctactttgcagatttaaaaaaacttctttaggctggtcccagtgcagtggtgtttataactcatcaatcatagccagttacagatttctttattcctccttcactcccactgcttcacttgactgcccttaaaaaaaaacaaaaaacaaacagaagtcttgagatggatgtttggcttattacttttcagtccttctttctattatattcatttaaatataaattttaatcctaaaaatgtactgcttttagctgcagcccacactttttttggtttgtttgttttgggggaaattctccaggcagtagttatggctgttgttgcttgctgctgcttctttcctatttttgttgatagctttgtgagagtacctgtaatgttgacatactataaagggtacatcttaaaatatgtaatttgataagttttctcatgaatgtaaccaggtaatgagcatattcatcaccctagaacatttcctcatgcccctttataatccttttctccccttttccttgctccttccccaggcaattatgatttgattccgtgttattttttttttgtacagagtctctgtcacccaggctggggtacagtggctctatctcaacttactgctacctccacctcccggcttaaagcaattcttgtgcctcagcctcccgagtagctgggacttcaggtgtacgccaccacacctggctcatttttgtgggtttttatttgtattaattaattaatttttatttatttatttagagatggagtctcgctctgctgcccaggctggggtgtagtggtgtgatctcggctcactgcaacctctgcctcccaggttcaagcagttctcctgcctcagcctcccaaatagctgggattacaggcttgtgccaccattcctggctaattttttctatttttagtagagatggggtttcaccatgttggccaggctggtcttgagctcctgacctcaagtgatccacatgcctcagcctccaaagtgctgggattacaggcatgagccaccacacctggcccaccccccacttttttttttgagacggagtctcgctctgtcacccatgctggagtgcagtggctagatctcggttcactgcagtctttgcctcctgggttcaagcgattctcctgtttcagcctcccaagtagctgggattacatgcgcctgccaccacgcctggctaatttttgtgtttttgtagagacggggtttcaccatgttggccaggctggtcttgaactcctgtcctcagctgatctgcctgctttggcctcccgaagtgctggtattctaggcgtgagccaccatgcccggcctctttttttgttaagatagggtcttgcggttgggtgtggtggctgacgcttgtaatcccagcactttgggaggccgaggtgggtggatcacaaggtcaggagatcgagaccatcctggctaacatggtgaaaccctgtctctactaaaaatacaaaaaattagccgggcgtggtggcgcatgcctgtagtcccccctacctgagaggctgaggcaggagaattgcttgaacccgggaggcggacggaggttgcagtgaaccgagattgcgccattgcattccagcctggacaacagagcgagactccatctcaaaaaagagggaaaaaaaaaaagacagggtcttgctctgtcacccaggccagagtgcagtgacaggatcgcagcttactgcaacctcaaactcctgaactcaagtgatcttcccacctcagcctcctgagtagctggaactacagatatacgctaccatggtgcctggctaattttttttagtagagatggggtcttgctttgttgcctaggctggtctcgaactcctggcttcaagggattctctcacctcagcctcccaaagtgttgggattacaggcatgagacaccgtgcctggcctgttttttcttattacatatttttgttctagaattaatttttccagatttgcttgttttctttgttttgcttggttttgggtttttttgggggttttgtttgtttgtttgtttttttaaagtaacttcgcgttacttgccaaatttttcaggattgggattttatatttttgaacatagtaagcaggtatatgaatagtttgctagtatctaggggagctttgttttgttccccgttggttactaatacttaaggttcatctttttccagtgtctgggcttcagatgttcagaagtttaatcacattccacttgtggactgcttttcttcttgttcatctttcctggtaggatatcacttttttggtttcaagcccaaagcagggggtcatttactcaagcttcttgtcttgtcttgtcttgtctcttctaatagagacagagtctcactgtgctacctagatagactatgttacttaaactcctgggcttaagcagtccttccacctcgcctcccaaaatgctgggattacagacacagtgcccacccagccacaaagcccccagtgttgatgggccctggatttccacttttgtccctggggcctatagcctcagcttccaaatctgctacatctctgctagatcagcaaatgaccccagagcaaaagtggcctagaatgcaaagcttcctcttcatggaatttcatcctcttcttcatcttgatcaccttatcttgttctatgattcttttaaggagaagttttcccttccttccagcttttttagttttgtgggtgtcaagtaggagagagataattagtttgaattatatactcctctattacccaaatataaaatcctttaaaaaaaaaaaagataaactgagacctagacaaattaagtaaccgtgtaagaccacataatcaatggaaatcctggtccagaatcctgagtgattttaatgaaatagttcacagtcatttattaagagcaggggcaccctagaaggaattttttgattctgttgaaccagatttatatttggcacatgctcattctttttagactttttagatagcctaataggatagaaccatcactatgttatataaatgtgaaatccatttgaaaatatgggacctgtcagtataggtactgcttgaactgtaactatgcatatatctgattggcttttatgccctacggtgagaaggaggtcaccttgaagctttgcaaagtaagttcttggttccatttttcacttgaatcccccttggatatcctccagaatgatgtgttttctttcccattgcaacattattttcagctttgtggagaaacaaagtatgttccaagtagcaggtagtcactgtaggccttctttgaactgtgaactttatttttttgcacctgaactgctttctaaaaccacataaacaatatgatagggaagttgctatctgaataaaaaaacaaaataaaacctcacaatgtgtttgatctagtactgagctacactggtatatgtgggctatatagaattatgtggtttagattacttgtttaagtatagcagtggcttggaggaaaatacattctgagtttcaaatagataatttgtaaaggaaaatttgaagtacagttgacttggcacttctgatattgaaattttagaagattttatttctgtatctcaatgtaatgcctaggcagaatccactagatgcttgtatagatggtataagcaataatgatttcagctattttaaaaaatttcaatctttttttaatgttgcctcttgaaataccatcttgtacttctcattttccctatacctccttttatgtgattaagttttattatgtatagacataaagggggcctggcacagtggctcatgcctgcaatcccagcattttgggaggccaaggcacaaggattgcttgagcccaggagttcaagacaagcctacgcaatgcagtgagaccctgtctcaaacaaaaaaaaaaaaaaaaaaaaaaaaaaggttggggagggtgctatgatattatgatacatatgttggttttcatccacagtttctgtcatagaacacccatagtccctgttatttcctaagtgactaaaacaatatacatatattttattgaaatatttggccttttattcttggtttttgaagtggcttcagtacagcttcagatcaataaaagtgaaagatggtcttttgtaataacgttggggcactttaaacctcagaagcaggcttcagaaaacagaatcgctctctgaccttttcttgccttgcttttacctgctcctttttctccccaagcaggcaatagaaactaaaaatatactctgatcatcccccaacattctgtcttggagctgacagcaaagaaattatctgacctaccttgtctgattggaggtcataagacccccatttcagaaggcatcctgccctgtacttgggaggaaagaagttgcacagagaggccaagaagactctgaacagagaggccttgctaggtttccccactcagtctgttagcattaggtcctactttgtccaatcatatttctacccggttgtccatgcttcagtcgtgacggtccagtgaagtcctggaccgggtacagagagcttccagatagctgaacacgtggagggtcctggagggtggtgcacccagggagggtatgagagctctgcaccccttcccacatgccttgttctgtgcacctcttcatctgcattctttgtgctattctttataataaaccagtacacgtgttttcctgagttctgggcacagctttagcaaattaatcaaacctaagaagggggtcatgggaacactgacttgaagctggttggccagaagttctggatgaggcctggccttacaactagtgtctgaagtgggggcagtcttgtgagactgagccctctctcagcctgtgggatctaatgctatctccaggtagatagcatgagaattgaattggattagaaggtgctcagctggtggtatcttctgcagaactgattgcttcttgttggtggggagaaatccccacacatttggtcacagaagtctactgtgttgatgattgtggtgtaagagcagaggaaaagcaatttgatttttctccacaaggggaagaaaatgtttcatgattcaactaatgatttacctttcattgtaaggttatcatgctcaagtattaatgtaggaaggcttttttgatgcagagtgtgtgtgtgtgtgtgtgtatatacgtgtgtgtttgtagagggctaacattaaaaagggaaatgtaataaggaagaagaaatggtgttctaaacttaaaacccatttcatctgctaaatcgtcctagtgaaataccaactttagttaattttaaaaaaagtttagttaattgtaaaaaaaaaaagaatctcttcattatattttaaaaaccatttatgtttcctttttctgtaatttattcatatttgtccattttaaatttcagtgttattcttattcttgttattgattttttaaaacgtggtctttatatttgagtgaaattaaccttccatcatgagttggagcattttttccccaatatatacttctcttttgattttgcttatggtcattttataatgccatggttttttttgttgtttgtttgttttttttttttttgagacggagtctcgctctctcagccaggctggagtgcagtggcgtgatctcagctcactgcaacctccacctccccgtttcaagcgattctcctgcctcagcctcccgagtagctgggattacaggcgtgcaccaccacgcctggctaatttttgtatttttagtagtaatggagtttcaccatgttggacaggctggtctcagactcctgacctcaggtgatctgcccatcttgacctcccaaagtcctgggattacaggcatgagccaccatgcccagcctggtcatggttttatacatgctatgtttataatcaaattttacttctatttaatagatgactaacacacttacacatagatgcttatacccaaatatatatgtttatagattttaaaatgctaattatatttaaaaggcctaataagtagtttcagcaaaagctgttatatatatgtatataatggaccaattgcagttggatcaataaagaactgtaaggtgtgttatgatctagaaaagtgattcttttttttttttgagatggagtcttgctctgttgcccatgctggagtgcagtggcacgatctcggctcactgcaagctccgcctcccgagttcacgccattttcctgcctcagcctcctgggtagctgggactacaggcacgtgccaccacacccagctaattttttgtatttttagtagagacggggtttcaccatgttggccaggatggtctcgatctcttgacctcgtgatccgccc
